United States Patent Application Publication US 2023/0041030 A1 - sequence listing, part 2

SEQ ID NO: 18750 - protein, 9 aa, Homo sapiens
  Table A; HLA-B*44:03; PIK3CA; Q546R; 1
TEREKDFLW

SEQ ID NO: 18751 - protein, 9 aa, Homo sapiens
  Table A; HLA-B*57:01; PIK3CA; Q546R; 1
TEREKDFLW

SEQ ID NO: 18752 - protein, 11 aa, Homo sapiens
  Table A; HLA-B*39:06; KRAS; G12A; 0
TEYKLVVVGAA

SEQ ID NO: 18753 - protein, 11 aa, Homo sapiens
  Table A; HLA-B*40:02; KRAS; G12A; 0
TEYKLVVVGAA

SEQ ID NO: 18754 - protein, 11 aa, Homo sapiens
  Table A; HLA-B*40:06; KRAS; G12A; 0
TEYKLVVVGAA

SEQ ID NO: 18755 - protein, 11 aa, Homo sapiens
  Table A; HLA-B*50:01; KRAS; G12A; 0
TEYKLVVVGAA

SEQ ID NO: 18756 - protein, 11 aa, Homo sapiens
  Table A; HLA-B*40:02; KRAS; G12V; 1
TEYKLVVVGAV

SEQ ID NO: 18757 - protein, 11 aa, Homo sapiens
  Table A; HLA-B*49:01; KRAS; G12V; 1
TEYKLVVVGAV

SEQ ID NO: 18758 - protein, 10 aa, Homo sapiens
  Table A; HLA-A*29:02; TP53; R213Q; 0
TFQHSVVVPY

SEQ ID NO: 18759 - protein, 10 aa, Homo sapiens
  Table A; HLA-B*27:02; TP53; R213Q; 0
TFQHSVVVPY

SEQ ID NO: 18760 - protein, 10 aa, Homo sapiens
  Table A; HLA-C*14:02; TP53; R213Q; 0
TFQHSVVVPY

SEQ ID NO: 18761 - protein, 10 aa, Homo sapiens
  Table A; HLA-A*68:01; PTPRB; R529Q; 0
TFTDLVPGQK

SEQ ID NO: 18762 - protein, 11 aa, Homo sapiens
  Table A; HLA-A*29:01; PTPRB; R529Q; 0
TFTDLVPGQKY

SEQ ID NO: 18763 - protein, 11 aa, Homo sapiens
  Table A; HLA-A*29:02; PTPRB; R529Q; 0
TFTDLVPGQKY

SEQ ID NO: 18764 - protein, 10 aa, Homo sapiens
  Table A; HLA-B*54:01; NFE2L2; E82D; 0
TGDFLPIQPA

SEQ ID NO: 18765 - protein, 8 aa, Homo sapiens
  Table A; HLA-C*05:01; ARHGEF12; R113Q; 1
TGDQIIKV

SEQ ID NO: 18766 - protein, 9 aa, Homo sapiens
  Table A; HLA-B*57:01; PIK3CA; E545G; 0
TGQEKDFLW

SEQ ID NO: 18767 - protein, 8 aa, Homo sapiens
  Table A; HLA-A*03:01; A1CF; E34K; 1
TGYSLVQK

SEQ ID NO: 18768 - protein, 8 aa, Homo sapiens
  Table A; HLA-A*03:02; A1CF; E34K; 0
TGYSLVQK

SEQ ID NO: 18769 - protein, 8 aa, Homo sapiens
  Table A; HLA-A*11:01; A1CF; E34K; 1
TGYSLVQK

SEQ ID NO: 18770 - protein, 8 aa, Homo sapiens
  Table A; HLA-A*68:01; A1CF; E34K; 0
TGYSLVQK

SEQ ID NO: 18771 - protein, 8 aa, Homo sapiens
  Table A; HLA-B*27:05; A1CF; E34K; 1
TGYSLVQK

SEQ ID NO: 18772 - protein, 8 aa, Homo sapiens
  Table A; HLA-B*51:01; A1CF; E34K; 1
TGYSLVQK

SEQ ID NO: 18773 - protein, 9 aa, Homo sapiens
  Table A; HLA-B*27:05; A1CF; E34K; 1
TGYSLVQKN

SEQ ID NO: 18774 - protein, 9 aa, Homo sapiens
  Table A; HLA-C*08:03; A1CF; E34K; 0
TGYSLVQKN

SEQ ID NO: 18775 - protein, 10 aa, Homo sapiens
  Table A; HLA-A*68:02; TP53; G262V; 0
TIITLEDSSV

SEQ ID NO: 18776 - protein, 9 aa, Homo sapiens
  Table A; HLA-A*31:01; CTNND1; A781T; 0
TINEVITEN

SEQ ID NO: 18777 - protein, 9 aa, Homo sapiens
  Table A; HLA-A*33:03; CTNND1; A781T; 0
TINEVITEN

SEQ ID NO: 18778 - protein, 9 aa, Homo sapiens
  Table A; HLA-A*68:01; CTNND1; A781T; 0
TINEVITEN

SEQ ID NO: 18779 - protein, 9 aa, Homo sapiens
  Table A; HLA-A*68:02; CTNND1; A781T; 0
TINEVITEN

SEQ ID NO: 18780 - protein, 10 aa, Homo sapiens
  Table A; HLA-A*02:04; CTNND1; A781T; 0
TINEVITENL

SEQ ID NO: 18781 - protein, 10 aa, Homo sapiens
  Table A; HLA-A*02:05; CTNND1; A781T; 0
TINEVITENL

SEQ ID NO: 18782 - protein, 10 aa, Homo sapiens
  Table A; HLA-A*02:07; CTNND1; A781T; 0
TINEVITENL

SEQ ID NO: 18783 - protein, 10 aa, Homo sapiens
  Table A; HLA-A*02:08; CTNND1; A781T; 0
TINEVITENL

SEQ ID NO: 18784 - protein, 10 aa, Homo sapiens
  Table A; HLA-A*03:01; CTNND1; A781T; 1
TINEVITENL

SEQ ID NO: 18785 - protein, 10 aa, Homo sapiens
  Table A; HLA-A*03:02; CTNND1; A781T; 0
TINEVITENL

SEQ ID NO: 18786 - protein, 10 aa, Homo sapiens
  Table A; HLA-A*11:01; CTNND1; A781T; 0
TINEVITENL

SEQ ID NO: 18787 - protein, 10 aa, Homo sapiens
  Table A; HLA-A*68:01; CTNND1; A781T; 0
TINEVITENL

SEQ ID NO: 18788 - protein, 10 aa, Homo sapiens
  Table A; HLA-A*68:02; CTNND1; A781T; 0
TINEVITENL

SEQ ID NO: 18789 - protein, 10 aa, Homo sapiens
  Table A; HLA-B*38:01; CTNND1; A781T; 0
TINEVITENL

SEQ ID NO: 18790 - protein, 10 aa, Homo sapiens
  Table A; HLA-B*50:01; CTNND1; A781T; 0
TINEVITENL

SEQ ID NO: 18791 - protein, 9 aa, Homo sapiens
  Table A; HLA-B*13:02; CTNNB1; T41I; 0
TITAPSLSG

SEQ ID NO: 18792 - protein, 9 aa, Homo sapiens
  Table A; HLA-B*54:01; CTNNB1; T41I; 0
TITAPSLSG

SEQ ID NO: 18793 - protein, 10 aa, Homo sapiens
  Table A; HLA-A*03:01; CTNNB1; T41I; 1
TITAPSLSGK

SEQ ID NO: 18794 - protein, 10 aa, Homo sapiens
  Table A; HLA-A*03:02; CTNNB1; T41I; 0
TITAPSLSGK

SEQ ID NO: 18795 - protein, 10 aa, Homo sapiens
  Table A; HLA-A*11:01; CTNNB1; T41I; 1
TITAPSLSGK

SEQ ID NO: 18796 - protein, 10 aa, Homo sapiens
  Table A; HLA-A*26:03; CTNNB1; T41I; 0
TITAPSLSGK

SEQ ID NO: 18797 - protein, 10 aa, Homo sapiens
  Table A; HLA-A*33:03; CTNNB1; T41I; 0
TITAPSLSGK

SEQ ID NO: 18798 - protein, 10 aa, Homo sapiens
  Table A; HLA-A*68:01; CTNNB1; T41I; 0
TITAPSLSGK

SEQ ID NO: 18799 - protein, 10 aa, Homo sapiens
  Table A; HLA-A*68:02; CTNNB1; T41I; 0
TITAPSLSGK

SEQ ID NO: 18800 - protein, 10 aa, Homo sapiens
  Table A; HLA-B*27:02; CTNNB1; T41I; 0
TITAPSLSGK

SEQ ID NO: 18801 - protein, 10 aa, Homo sapiens
  Table A; HLA-B*15:03; SPOP; R121Q; 0
TKAMESQQAY

SEQ ID NO: 18802 - protein, 10 aa, Homo sapiens
  Table A; HLA-B*15:03; SPOP; M117V; 0
TKAVESQRAY

SEQ ID NO: 18803 - protein, 9 aa, Homo sapiens
  Table A; HLA-A*02:01; ARHGEF12; R705H; 1
TLDGTPHTL

SEQ ID NO: 18804 - protein, 9 aa, Homo sapiens
  Table A; HLA-A*02:03; ARHGEF12; R705H; 0
TLDGTPHTL

SEQ ID NO: 18805 - protein, 9 aa, Homo sapiens
  Table A; HLA-A*02:04; ARHGEF12; R705H; 0
TLDGTPHTL

SEQ ID NO: 18806 - protein, 9 aa, Homo sapiens
  Table A; HLA-A*02:05; ARHGEF12; R705H; 0
TLDGTPHTL

SEQ ID NO: 18807 - protein, 9 aa, Homo sapiens
  Table A; HLA-A*02:06; ARHGEF12; R705H; 0
TLDGTPHTL

SEQ ID NO: 18808 - protein, 9 aa, Homo sapiens
  Table A; HLA-A*02:07; ARHGEF12; R705H; 0
TLDGTPHTL

SEQ ID NO: 18809 - protein, 9 aa, Homo sapiens
  Table A; HLA-B*13:01; ARHGEF12; R705H; 0
TLDGTPHTL

SEQ ID NO: 18810 - protein, 9 aa, Homo sapiens
  Table A; HLA-B*13:02; ARHGEF12; R705H; 0
TLDGTPHTL

SEQ ID NO: 18811 - protein, 9 aa, Homo sapiens
  Table A; HLA-B*15:02; ARHGEF12; R705H; 0
TLDGTPHTL

SEQ ID NO: 18812 - protein, 9 aa, Homo sapiens
  Table A; HLA-B*15:10; ARHGEF12; R705H; 0
TLDGTPHTL

SEQ ID NO: 18813 - protein, 9 aa, Homo sapiens
  Table A; HLA-B*15:13; ARHGEF12; R705H; 0
TLDGTPHTL

SEQ ID NO: 18814 - protein, 9 aa, Homo sapiens
  Table A; HLA-B*35:02; ARHGEF12; R705H; 0
TLDGTPHTL

SEQ ID NO: 18815 - protein, 9 aa, Homo sapiens
  Table A; HLA-B*35:03; ARHGEF12; R705H; 0
TLDGTPHTL

SEQ ID NO: 18816 - protein, 9 aa, Homo sapiens
  Table A; HLA-B*35:12; ARHGEF12; R705H; 0
TLDGTPHTL

SEQ ID NO: 18817 - protein, 9 aa, Homo sapiens
  Table A; HLA-B*38:01; ARHGEF12; R705H; 0
TLDGTPHTL

SEQ ID NO: 18818 - protein, 9 aa, Homo sapiens
  Table A; HLA-B*39:01; ARHGEF12; R705H; 0
TLDGTPHTL

SEQ ID NO: 18819 - protein, 9 aa, Homo sapiens
  Table A; HLA-B*40:01; ARHGEF12; R705H; 1
TLDGTPHTL

SEQ ID NO: 18820 - protein, 9 aa, Homo sapiens
  Table A; HLA-B*48:01; ARHGEF12; R705H; 0
TLDGTPHTL

SEQ ID NO: 18821 - protein, 9 aa, Homo sapiens
  Table A; HLA-C*03:04; ARHGEF12; R705H; 1
TLDGTPHTL

SEQ ID NO: 18822 - protein, 9 aa, Homo sapiens
  Table A; HLA-C*04:01; ARHGEF12; R705H; 1
TLDGTPHTL

SEQ ID NO: 18823 - protein, 9 aa, Homo sapiens
  Table A; HLA-C*05:01; ARHGEF12; R705H; 1
TLDGTPHTL

SEQ ID NO: 18824 - protein, 9 aa, Homo sapiens
  Table A; HLA-C*08:01; ARHGEF12; R705H; 0
TLDGTPHTL

SEQ ID NO: 18825 - protein, 9 aa, Homo sapiens
  Table A; HLA-C*08:02; ARHGEF12; R705H; 0
TLDGTPHTL

SEQ ID NO: 18826 - protein, 9 aa, Homo sapiens
  Table A; HLA-C*17:01; ARHGEF12; R705H; 0
TLDGTPHTL

SEQ ID NO: 18827 - protein, 11 aa, Homo sapiens
  Table A; HLA-A*68:01; TP53; G266R; 0
TLEDSSGNLLR

SEQ ID NO: 18828 - protein, 11 aa, Homo sapiens
  Table A; HLA-B*27:02; TP53; G266R; 0
TLEDSSGNLLR

SEQ ID NO: 18829 - protein, 11 aa, Homo sapiens
  Table A; HLA-C*08:03; TP53; G266R; 0
TLEDSSGNLLR

SEQ ID NO: 18830 - protein, 11 aa, Homo sapiens
  Table A; HLA-A*02:01; TP53; G266V; 1
TLEDSSGNLLV

SEQ ID NO: 18831 - protein, 11 aa, Homo sapiens
  Table A; HLA-A*02:04; TP53; G266V; 0
TLEDSSGNLLV

SEQ ID NO: 18832 - protein, 11 aa, Homo sapiens
  Table A; HLA-B*13:02; TP53; G266V; 0
TLEDSSGNLLV

SEQ ID NO: 18833 - protein, 11 aa, Homo sapiens
  Table A; HLA-C*08:03; TP53; G266V; 0
TLEDSSGNLLV

SEQ ID NO: 18834 - protein, 9 aa, Homo sapiens
  Table A; HLA-A*02:01; TP53; G262V; 1
TLEDSSVNL

SEQ ID NO: 18835 - protein, 9 aa, Homo sapiens
  Table A; HLA-A*02:04; TP53; G262V; 0
TLEDSSVNL

SEQ ID NO: 18836 - protein, 9 aa, Homo sapiens
  Table A; HLA-A*02:05; TP53; G262V; 0
TLEDSSVNL

SEQ ID NO: 18837 - protein, 9 aa, Homo sapiens
  Table A; HLA-A*02:06; TP53; G262V; 0
TLEDSSVNL

SEQ ID NO: 18838 - protein, 9 aa, Homo sapiens
  Table A; HLA-A*02:07; TP53; G262V; 0
TLEDSSVNL

SEQ ID NO: 18839 - protein, 9 aa, Homo sapiens
  Table A; HLA-B*13:01; TP53; G262V; 0
TLEDSSVNL

SEQ ID NO: 18840 - protein, 9 aa, Homo sapiens
  Table A; HLA-B*35:02; TP53; G262V; 0
TLEDSSVNL

SEQ ID NO: 18841 - protein, 9 aa, Homo sapiens
  Table A; HLA-B*35:03; TP53; G262V; 0
TLEDSSVNL

SEQ ID NO: 18842 - protein, 9 aa, Homo sapiens
  Table A; HLA-B*35:12; TP53; G262V; 0
TLEDSSVNL

SEQ ID NO: 18843 - protein, 9 aa, Homo sapiens
  Table A; HLA-B*38:01; TP53; G262V; 0
TLEDSSVNL

SEQ ID NO: 18844 - protein, 9 aa, Homo sapiens
  Table A; HLA-B*39:01; TP53; G262V; 0
TLEDSSVNL

SEQ ID NO: 18845 - protein, 9 aa, Homo sapiens
  Table A; HLA-B*40:01; TP53; G262V; 0
TLEDSSVNL

SEQ ID NO: 18846 - protein, 9 aa, Homo sapiens
  Table A; HLA-C*05:01; TP53; G262V; 1
TLEDSSVNL

SEQ ID NO: 18847 - protein, 9 aa, Homo sapiens
  Table A; HLA-C*08:02; TP53; G262V; 0
TLEDSSVNL

SEQ ID NO: 18848 - protein, 10 aa, Homo sapiens
  Table A; HLA-A*02:05; TP53; G262V; 0
TLEDSSVNLL

SEQ ID NO: 18849 - protein, 10 aa, Homo sapiens
  Table A; HLA-B*38:01; TP53; G262V; 0
TLEDSSVNLL

SEQ ID NO: 18850 - protein, 10 aa, Homo sapiens
  Table A; HLA-B*39:01; TP53; G262V; 0
TLEDSSVNLL

SEQ ID NO: 18851 - protein, 10 aa, Homo sapiens
  Table A; HLA-C*08:03; TP53; G262V; 0
TLEDSSVNLL

SEQ ID NO: 18852 - protein, 9 aa, Homo sapiens
  Table A; HLA-B*15:01; MTOR; S2215Y; 1
TLLANDPTY

SEQ ID NO: 18853 - protein, 9 aa, Homo sapiens
  Table A; HLA-B*15:02; MTOR; S2215Y; 0
TLLANDPTY

SEQ ID NO: 18854 - protein, 9 aa, Homo sapiens
  Table A; HLA-B*15:13; MTOR; S2215Y; 0
TLLANDPTY

SEQ ID NO: 18855 - protein, 9 aa, Homo sapiens
  Table A; HLA-B*27:05; MTOR; S2215Y; 1
TLLANDPTY

SEQ ID NO: 18856 - protein, 9 aa, Homo sapiens
  Table A; HLA-B*35:01; MTOR; S2215Y; 1
TLLANDPTY

SEQ ID NO: 18857 - protein, 9 aa, Homo sapiens
  Table A; HLA-B*35:08; MTOR; S2215Y; 0
TLLANDPTY

SEQ ID NO: 18858 - protein, 9 aa, Homo sapiens
  Table A; HLA-C*08:01; MTOR; S2215Y; 0
TLLANDPTY

SEQ ID NO: 18859 - protein, 10 aa, Homo sapiens
  Table A; HLA-A*02:01; MTOR; S2215Y; 1
TLLANDPTYL

SEQ ID NO: 18860 - protein, 10 aa, Homo sapiens
  Table A; HLA-A*02:03; MTOR; S2215Y; 0
TLLANDPTYL

SEQ ID NO: 18861 - protein, 10 aa, Homo sapiens
  Table A; HLA-A*02:04; MTOR; S2215Y; 0
TLLANDPTYL

SEQ ID NO: 18862 - protein, 10 aa, Homo sapiens
  Table A; HLA-C*17:01; MTOR; S2215Y; 0
TLLANDPTYL

SEQ ID NO: 18863 - protein, 8 aa, Homo sapiens
  Table A; HLA-A*02:04; STAG1; A116T; 0
TLLDLINF

SEQ ID NO: 18864 - protein, 9 aa, Homo sapiens
  Table A; HLA-A*02:04; STAG1; A116T; 0
TLLDLINFF

SEQ ID NO: 18865 - protein, 9 aa, Homo sapiens
  Table A; HLA-A*23:01; STAG1; A116T; 0
TLLDLINFF

SEQ ID NO: 18866 - protein, 10 aa, Homo sapiens
  Table A; HLA-A*02:01; STAG1; A116T; 1
TLLDLINFFI

SEQ ID NO: 18867 - protein, 10 aa, Homo sapiens
  Table A; HLA-A*02:04; STAG1; A116T; 0
TLLDLINFFI

SEQ ID NO: 18868 - protein, 9 aa, Homo sapiens
  Table A; HLA-A*02:07; ERBB3; V104M; 0
TLPLPNLRM

SEQ ID NO: 18869 - protein, 9 aa, Homo sapiens
  Table A; HLA-B*41:02; TP53; R337L; 0
TLQIRGREL

SEQ ID NO: 18870 - protein, 8 aa, Homo sapiens
  Table A; HLA-A*02:03; CTNNB1; N387K; 0
TLRKLSDA

SEQ ID NO: 18871 - protein, 9 aa, Homo sapiens
  Table A; HLA-A*02:03; CTNNB1; N387K; 0
TLRKLSDAA

SEQ ID NO: 18872 - protein, 9 aa, Homo sapiens
  Table A; HLA-B*39:06; CTNNB1; N387K; 0
TLRKLSDAA

SEQ ID NO: 18873 - protein, 9 aa, Homo sapiens
  Table A; HLA-B*54:01; CTNNB1; N387K; 0
TLRKLSDAA

SEQ ID NO: 18874 - protein, 11 aa, Homo sapiens
  Table A; HLA-A*03:01; CTNNB1; N387K; 1
TLRKLSDAATK

SEQ ID NO: 18875 - protein, 11 aa, Homo sapiens
  Table A; HLA-A*03:02; CTNNB1; N387K; 0
TLRKLSDAATK

SEQ ID NO: 18876 - protein, 10 aa, Homo sapiens
  Table A; HLA-B*15:02; PPP2R1A; S256F; 0
TLRQAAEDKF

SEQ ID NO: 18877 - protein, 9 aa, Homo sapiens
  Table A; HLA-B*54:01; CDKN2A; H83Y; 0
TLTRPVYDA

SEQ ID NO: 18878 - protein, 9 aa, Homo sapiens
  Table A; HLA-B*55:02; CDKN2A; H83Y; 0
TLTRPVYDA

SEQ ID NO: 18879 - protein, 10 aa, Homo sapiens
  Table A; HLA-C*08:03; CDKN2A; H83Y; 0
TLTRPVYDAA

SEQ ID NO: 18880 - protein, 9 aa, Homo sapiens
  Table A; HLA-A*02:03; FBXW7; G423V; 0
TLVGHTGVV

SEQ ID NO: 18881 - protein, 10 aa, Homo sapiens
  Table A; HLA-B*15:02; FBXW7; G423V; 0
TLVGHTGVVW

SEQ ID NO: 18882 - protein, 10 aa, Homo sapiens
  Table A; HLA-B*15:13; FBXW7; G423V; 0
TLVGHTGVVW

SEQ ID NO: 18883 - protein, 10 aa, Homo sapiens
  Table A; HLA-C*08:01; FBXW7; G423V; 0
TLVGHTGVVW

SEQ ID NO: 18884 - protein, 10 aa, Homo sapiens
  Table A; HLA-B*15:02; FBXW7; R465C; 0
TLYGHTSTVC

SEQ ID NO: 18885 - protein, 10 aa, Homo sapiens
  Table A; HLA-B*15:02; FBXW7; R465H; 0
TLYGHTSTVH

SEQ ID NO: 18886 - protein, 10 aa, Homo sapiens
  Table A; HLA-C*08:01; FBXW7; R465H; 0
TLYGHTSTVH

SEQ ID NO: 18887 - protein, 8 aa, Homo sapiens
  Table A; HLA-A*26:01; RAC1; P29L; 0
TNAFLGEY

SEQ ID NO: 18888 - protein, 8 aa, Homo sapiens
  Table A; HLA-B*15:01; RAC1; P29L; 1
TNAFLGEY

SEQ ID NO: 18889 - protein, 8 aa, Homo sapiens
  Table A; HLA-B*35:01; RAC1; P29L; 1
TNAFLGEY

SEQ ID NO: 18890 - protein, 8 aa, Homo sapiens
  Table A; HLA-B*39:01; RAC1; P29L; 0
TNAFLGEY

SEQ ID NO: 18891 - protein, 9 aa, Homo sapiens
  Table A; HLA-A*68:02; RAC1; P29L; 0
TNAFLGEYI

SEQ ID NO: 18892 - protein, 8 aa, Homo sapiens
  Table A; HLA-A*26:01; RAC1; P29S; 1
TNAFSGEY

SEQ ID NO: 18893 - protein, 8 aa, Homo sapiens
  Table A; HLA-B*15:01; RAC1; P29S; 1
TNAFSGEY

SEQ ID NO: 18894 - protein, 8 aa, Homo sapiens
  Table A; HLA-B*15:02; RAC1; P29S; 0
TNAFSGEY

SEQ ID NO: 18895 - protein, 8 aa, Homo sapiens
  Table A; HLA-B*35:01; RAC1; P29S; 1
TNAFSGEY

SEQ ID NO: 18896 - protein, 8 aa, Homo sapiens
  Table A; HLA-B*39:01; RAC1; P29S; 0
TNAFSGEY

SEQ ID NO: 18897 - protein, 9 aa, Homo sapiens
  Table A; HLA-B*38:01; RAC1; P29S; 1
TNAFSGEYI

SEQ ID NO: 18898 - protein, 9 aa, Homo sapiens
  Table A; HLA-A*29:01; CHST11; A159T; 0
TNLKTLNQY

SEQ ID NO: 18899 - protein, 9 aa, Homo sapiens
  Table A; HLA-A*29:02; CHST11; A159T; 0
TNLKTLNQY

SEQ ID NO: 18900 - protein, 9 aa, Homo sapiens
  Table A; HLA-B*15:02; CHST11; A159T; 0
TNLKTLNQY

SEQ ID NO: 18901 - protein, 9 aa, Homo sapiens
  Table A; HLA-B*35:01; CHST11; A159T; 1
TNLKTLNQY

SEQ ID NO: 18902 - protein, 8 aa, Homo sapiens
  Table A; HLA-B*39:06; ARHGEF12; R705H; 0
TPHTLNTV

SEQ ID NO: 18903 - protein, 8 aa, Homo sapiens
  Table A; HLA-B*51:01; ARHGEF12; R705H; 1
TPHTLNTV

SEQ ID NO: 18904 - protein, 8 aa, Homo sapiens
  Table A; HLA-B*54:01; ARHGEF12; R705H; 0
TPHTLNTV

SEQ ID NO: 18905 - protein, 8 aa, Homo sapiens
  Table A; HLA-B*55:01; ARHGEF12; R705H; 0
TPHTLNTV

SEQ ID NO: 18906 - protein, 8 aa, Homo sapiens
  Table A; HLA-B*55:02; ARHGEF12; R705H; 0
TPHTLNTV

SEQ ID NO: 18907 - protein, 8 aa, Homo sapiens
  Table A; HLA-B*56:01; ARHGEF12; R705H; 0
TPHTLNTV

SEQ ID NO: 18908 - protein, 9 aa, Homo sapiens
  Table A; HLA-B*07:02; ARHGEF12; R705H; 1
TPHTLNTVF

SEQ ID NO: 18909 - protein, 9 aa, Homo sapiens
  Table A; HLA-B*15:02; ARHGEF12; R705H; 0
TPHTLNTVF

SEQ ID NO: 18910 - protein, 9 aa, Homo sapiens
  Table A; HLA-B*35:01; ARHGEF12; R705H; 1
TPHTLNTVF

SEQ ID NO: 18911 - protein, 9 aa, Homo sapiens
  Table A; HLA-B*35:03; ARHGEF12; R705H; 0
TPHTLNTVF

SEQ ID NO: 18912 - protein, 9 aa, Homo sapiens
  Table A; HLA-B*35:08; ARHGEF12; R705H; 0
TPHTLNTVF

SEQ ID NO: 18913 - protein, 8 aa, Homo sapiens
  Table A; HLA-B*54:01; CAMTA1; A1117V; 0
TPLMWVCA

SEQ ID NO: 18914 - protein, 10 aa, Homo sapiens
  Table A; HLA-B*07:02; SMARCA4; E920K; 1
TPLQNKLPKL

SEQ ID NO: 18915 - protein, 8 aa, Homo sapiens
  Table A; HLA-B*39:06; PPP2R1A; R183W; 0
TPMVRWAA

SEQ ID NO: 18916 - protein, 8 aa, Homo sapiens
  Table A; HLA-B*54:01; PPP2R1A; R183W; 0
TPMVRWAA

SEQ ID NO: 18917 - protein, 8 aa, Homo sapiens
  Table A; HLA-B*55:01; PPP2R1A; R183W; 0
TPMVRWAA

SEQ ID NO: 18918 - protein, 8 aa, Homo sapiens
  Table A; HLA-B*55:02; PPP2R1A; R183W; 0
TPMVRWAA

SEQ ID NO: 18919 - protein, 8 aa, Homo sapiens
  Table A; HLA-B*56:01; PPP2R1A; R183W; 0
TPMVRWAA

SEQ ID NO: 18920 - protein, 9 aa, Homo sapiens
  Table A; HLA-B*07:02; PPP2R1A; R183W; 1
TPMVRWAAA

SEQ ID NO: 18921 - protein, 9 aa, Homo sapiens
  Table A; HLA-B*08:01; PPP2R1A; R183W; 1
TPMVRWAAA

SEQ ID NO: 18922 - protein, 9 aa, Homo sapiens
  Table A; HLA-B*39:06; PPP2R1A; R183W; 0
TPMVRWAAA

SEQ ID NO: 18923 - protein, 9 aa, Homo sapiens
  Table A; HLA-B*54:01; PPP2R1A; R183W; 0
TPMVRWAAA

SEQ ID NO: 18924 - protein, 9 aa, Homo sapiens
  Table A; HLA-B*55:01; PPP2R1A; R183W; 0
TPMVRWAAA

SEQ ID NO: 18925 - protein, 9 aa, Homo sapiens
  Table A; HLA-B*55:02; PPP2R1A; R183W; 0
TPMVRWAAA

SEQ ID NO: 18926 - protein, 9 aa, Homo sapiens
  Table A; HLA-B*56:01; PPP2R1A; R183W; 0
TPMVRWAAA

SEQ ID NO: 18927 - protein, 8 aa, Homo sapiens
  Table A; HLA-B*07:02; TP53; V157F; 1
TPPPGTRF

SEQ ID NO: 18928 - protein, 8 aa, Homo sapiens
  Table A; HLA-B*35:01; TP53; V157F; 1
TPPPGTRF

SEQ ID NO: 18929 - protein, 8 aa, Homo sapiens
  Table A; HLA-B*35:08; TP53; V157F; 0
TPPPGTRF

SEQ ID NO: 18930 - protein, 8 aa, Homo sapiens
  Table A; HLA-B*51:01; TP53; V157F; 0
TPPPGTRF

SEQ ID NO: 18931 - protein, 9 aa, Homo sapiens
  Table A; HLA-B*35:01; TP53; R158H; 0
TPPPGTRVH

SEQ ID NO: 18932 - protein, 10 aa, Homo sapiens
  Table A; HLA-B*54:01; TP53; R158H; 0
TPPPGTRVHA

SEQ ID NO: 18933 - protein, 10 aa, Homo sapiens
  Table A; HLA-B*55:01; TP53; R158H; 0
TPPPGTRVHA

SEQ ID NO: 18934 - protein, 10 aa, Homo sapiens
  Table A; HLA-B*55:02; TP53; R158H; 0
TPPPGTRVHA

SEQ ID NO: 18935 - protein, 10 aa, Homo sapiens
  Table A; HLA-B*56:01; TP53; R158H; 0
TPPPGTRVHA

SEQ ID NO: 18936 - protein, 11 aa, Homo sapiens
  Table A; HLA-B*07:02; TP53; R158H; 1
TPPPGTRVHAM

SEQ ID NO: 18937 - protein, 11 aa, Homo sapiens
  Table A; HLA-B*08:01; TP53; R158H; 1
TPPPGTRVHAM

SEQ ID NO: 18938 - protein, 11 aa, Homo sapiens
  Table A; HLA-B*35:01; TP53; R158H; 0
TPPPGTRVHAM

SEQ ID NO: 18939 - protein, 11 aa, Homo sapiens
  Table A; HLA-B*35:03; TP53; R158H; 0
TPPPGTRVHAM

SEQ ID NO: 18940 - protein, 10 aa, Homo sapiens
  Table A; HLA-A*68:02; TP53; A159V; 0
TPPPGTRVRV

SEQ ID NO: 18941 - protein, 9 aa, Homo sapiens
  Table A; HLA-B*13:02; PTK6; H126P; 0
TQAVRPYKI

SEQ ID NO: 18942 - protein, 9 aa, Homo sapiens
  Table A; HLA-B*13:01; PIK3CA; E81K; 0
TQEAEREKF

SEQ ID NO: 18943 - protein, 9 aa, Homo sapiens
  Table A; HLA-B*38:01; PIK3CA; E81K; 0
TQEAEREKF

SEQ ID NO: 18944 - protein, 9 aa, Homo sapiens
  Table A; HLA-B*15:01; MECOM; R205S; 1
TQFSNLCSH

SEQ ID NO: 18945 - protein, 8 aa, Homo sapiens
  Table A; HLA-A*32:01; PIK3CB; R321Q; 0
TQIISHVW

SEQ ID NO: 18946 - protein, 8 aa, Homo sapiens
  Table A; HLA-B*15:13; PIK3CB; R321Q; 0
TQIISHVW

SEQ ID NO: 18947 - protein, 9 aa, Homo sapiens
  Table A; HLA-A*32:01; PTPRT; M903I; 0
TQIKRGQGY

SEQ ID NO: 18948 - protein, 9 aa, Homo sapiens
  Table A; HLA-B*15:01; PTPRT; M903I; 1
TQIKRGQGY

SEQ ID NO: 18949 - protein, 9 aa, Homo sapiens
  Table A; HLA-B*15:02; PTPRT; M903I; 0
TQIKRGQGY

SEQ ID NO: 18950 - protein, 9 aa, Homo sapiens
  Table A; HLA-B*15:03; PTPRT; M903I; 0
TQIKRGQGY

SEQ ID NO: 18951 - protein, 9 aa, Homo sapiens
  Table A; HLA-A*02:05; ZFHX3; R846C; 0
TQIQHNCHL

SEQ ID NO: 18952 - protein, 9 aa, Homo sapiens
  Table A; HLA-B*15:10; ZFHX3; R846C; 0
TQIQHNCHL

SEQ ID NO: 18953 - protein, 9 aa, Homo sapiens
  Table A; HLA-A*02:03; MAP2K1; K57N; 0
TQNQKVGEL

SEQ ID NO: 18954 - protein, 9 aa, Homo sapiens
  Table A; HLA-A*02:05; MAP2K1; K57N; 0
TQNQKVGEL

SEQ ID NO: 18955 - protein, 9 aa, Homo sapiens
  Table A; HLA-A*02:06; MAP2K1; K57N; 0
TQNQKVGEL

SEQ ID NO: 18956 - protein, 9 aa, Homo sapiens
  Table A; HLA-A*02:08; MAP2K1; K57N; 0
TQNQKVGEL

SEQ ID NO: 18957 - protein, 9 aa, Homo sapiens
  Table A; HLA-A*30:01; MAP2K1; K57N; 0
TQNQKVGEL

SEQ ID NO: 18958 - protein, 9 aa, Homo sapiens
  Table A; HLA-B*07:02; MAP2K1; K57N; 1
TQNQKVGEL

SEQ ID NO: 18959 - protein, 9 aa, Homo sapiens
  Table A; HLA-B*08:01; MAP2K1; K57N; 0
TQNQKVGEL

SEQ ID NO: 18960 - protein, 9 aa, Homo sapiens
  Table A; HLA-B*13:01; MAP2K1; K57N; 0
TQNQKVGEL

SEQ ID NO: 18961 - protein, 9 aa, Homo sapiens
  Table A; HLA-B*13:02; MAP2K1; K57N; 0
TQNQKVGEL

SEQ ID NO: 18962 - protein, 9 aa, Homo sapiens
  Table A; HLA-B*14:02; MAP2K1; K57N; 0
TQNQKVGEL

SEQ ID NO: 18963 - protein, 9 aa, Homo sapiens
  Table A; HLA-B*15:01; MAP2K1; K57N; 0
TQNQKVGEL

SEQ ID NO: 18964 - protein, 9 aa, Homo sapiens
  Table A; HLA-B*15:02; MAP2K1; K57N; 0
TQNQKVGEL

SEQ ID NO: 18965 - protein, 9 aa, Homo sapiens
  Table A; HLA-B*15:10; MAP2K1; K57N; 0
TQNQKVGEL

SEQ ID NO: 18966 - protein, 9 aa, Homo sapiens
  Table A; HLA-B*38:01; MAP2K1; K57N; 0
TQNQKVGEL

SEQ ID NO: 18967 - protein, 9 aa, Homo sapiens
  Table A; HLA-B*39:01; MAP2K1; K57N; 0
TQNQKVGEL

SEQ ID NO: 18968 - protein, 9 aa, Homo sapiens
  Table A; HLA-B*40:02; MAP2K1; K57N; 0
TQNQKVGEL

SEQ ID NO: 18969 - protein, 9 aa, Homo sapiens
  Table A; HLA-B*41:02; MAP2K1; K57N; 0
TQNQKVGEL

SEQ ID NO: 18970 - protein, 9 aa, Homo sapiens
  Table A; HLA-B*44:05; MAP2K1; K57N; 0
TQNQKVGEL

SEQ ID NO: 18971 - protein, 9 aa, Homo sapiens
  Table A; HLA-B*46:01; MAP2K1; K57N; 0
TQNQKVGEL

SEQ ID NO: 18972 - protein, 9 aa, Homo sapiens
  Table A; HLA-B*48:01; MAP2K1; K57N; 0
TQNQKVGEL

SEQ ID NO: 18973 - protein, 9 aa, Homo sapiens
  Table A; HLA-C*01:02; MAP2K1; K57N; 0
TQNQKVGEL

SEQ ID NO: 18974 - protein, 9 aa, Homo sapiens
  Table A; HLA-C*08:01; MAP2K1; K57N; 0
TQNQKVGEL

SEQ ID NO: 18975 - protein, 9 aa, Homo sapiens
  Table A; HLA-C*08:03; MAP2K1; K57N; 0
TQNQKVGEL

SEQ ID NO: 18976 - protein, 10 aa, Homo sapiens
  Table A; HLA-A*03:01; MAP2K1; K57N; 1
TQNQKVGELK

SEQ ID NO: 18977 - protein, 10 aa, Homo sapiens
  Table A; HLA-A*03:02; MAP2K1; K57N; 0
TQNQKVGELK

SEQ ID NO: 18978 - protein, 10 aa, Homo sapiens
  Table A; HLA-A*11:01; MAP2K1; K57N; 0
TQNQKVGELK

SEQ ID NO: 18979 - protein, 10 aa, Homo sapiens
  Table A; HLA-B*27:02; MAP2K1; K57N; 0
TQNQKVGELK

SEQ ID NO: 18980 - protein, 8 aa, Homo sapiens
  Table A; HLA-B*15:01; PCBP1; L100Q; 1
TQRLVVPA

SEQ ID NO: 18981 - protein, 8 aa, Homo sapiens
  Table A; HLA-B*15:02; PCBP1; L100Q; 0
TQRLVVPA

SEQ ID NO: 18982 - protein, 8 aa, Homo sapiens
  Table A; HLA-B*39:06; PCBP1; L100Q; 0
TQRLVVPA

SEQ ID NO: 18983 - protein, 9 aa, Homo sapiens
  Table A; HLA-A*30:01; PCBP1; L100Q; 0
TQRLVVPAT

SEQ ID NO: 18984 - protein, 9 aa, Homo sapiens
  Table A; HLA-B*13:02; PCBP1; L100Q; 0
TQRLVVPAT

SEQ ID NO: 18985 - protein, 9 aa, Homo sapiens
  Table A; HLA-B*39:06; PCBP1; L100Q; 0
TQRLVVPAT

SEQ ID NO: 18986 - protein, 8 aa, Homo sapiens
  Table A; HLA-B*14:01; SMARCA4; G1162S; 0
TRAGGLSL

SEQ ID NO: 18987 - protein, 8 aa, Homo sapiens
  Table A; HLA-B*14:02; SMARCA4; G1162S; 0
TRAGGLSL

SEQ ID NO: 18988 - protein, 8 aa, Homo sapiens
  Table A; HLA-B*15:10; SMARCA4; G1162S; 0
TRAGGLSL

SEQ ID NO: 18989 - protein, 8 aa, Homo sapiens
  Table A; HLA-B*38:01; SMARCA4; G1162S; 0
TRAGGLSL

SEQ ID NO: 18990 - protein, 8 aa, Homo sapiens
  Table A; HLA-B*39:01; SMARCA4; G1162S; 0
TRAGGLSL

SEQ ID NO: 18991 - protein, 10 aa, Homo sapiens
  Table A; HLA-B*27:02; SMARCA4; G1162S; 0
TRAGGLSLNL

SEQ ID NO: 18992 - protein, 10 aa, Homo sapiens
  Table A; HLA-B*27:05; SMARCA4; G1162S; 0
TRAGGLSLNL

SEQ ID NO: 18993 - protein, 10 aa, Homo sapiens
  Table A; HLA-B*38:01; SMARCA4; G1162S; 0
TRAGGLSLNL

SEQ ID NO: 18994 - protein, 10 aa, Homo sapiens
  Table A; HLA-B*39:01; SMARCA4; G1162S; 0
TRAGGLSLNL

SEQ ID NO: 18995 - protein, 10 aa, Homo sapiens
  Table A; HLA-B*39:06; PIK3CA; E545A; 0
TRDPLSEITA

SEQ ID NO: 18996 - protein, 11 aa, Homo sapiens
  Table A; HLA-B*27:02; PIK3CA; Q546K; 0
TRDPLSEITEK

SEQ ID NO: 18997 - protein, 11 aa, Homo sapiens
  Table A; HLA-B*27:05; PIK3CA; Q546K; 0
TRDPLSEITEK

SEQ ID NO: 18998 - protein, 11 aa, Homo sapiens
  Table A; HLA-B*27:02; PIK3CA; Q546R; 0
TRDPLSEITER

SEQ ID NO: 18999 - protein, 10 aa, Homo sapiens
  Table A; HLA-B*39:01; PIK3CA; E545G; 0
TRDPLSEITG

SEQ ID NO: 19000 - protein, 10 aa, Homo sapiens
  Table A; HLA-B*27:02; PIK3CA; E545K; 0
TRDPLSEITK

SEQ ID NO: 19001 - protein, 10 aa, Homo sapiens
  Table A; HLA-B*27:05; PIK3CA; E545K; 1
TRDPLSEITK

SEQ ID NO: 19002 - protein, 9 aa, Homo sapiens
  Table A; HLA-B*14:02; PPP2R1A; P179R; 1
TRMVRRAAA

SEQ ID NO: 19003 - protein, 8 aa, Homo sapiens
  Table A; HLA-B*39:06; CDKN2A; H83Y; 0
TRPVYDAA

SEQ ID NO: 19004 - protein, 8 aa, Homo sapiens
  Table A; HLA-B*27:05; TP53; I195T; 1
TRVEGNLR

SEQ ID NO: 19005 - protein, 9 aa, Homo sapiens
  Table A; HLA-B*13:02; TP53; I195T; 0
TRVEGNLRV

SEQ ID NO: 19006 - protein, 9 aa, Homo sapiens
  Table A; HLA-B*15:10; TP53; I195T; 0
TRVEGNLRV

SEQ ID NO: 19007 - protein, 9 aa, Homo sapiens
  Table A; HLA-B*27:05; TP53; I195T; 1
TRVEGNLRV

SEQ ID NO: 19008 - protein, 9 aa, Homo sapiens
  Table A; HLA-B*38:01; TP53; I195T; 0
TRVEGNLRV

SEQ ID NO: 19009 - protein, 9 aa, Homo sapiens
  Table A; HLA-B*39:01; TP53; I195T; 0
TRVEGNLRV

SEQ ID NO: 19010 - protein, 9 aa, Homo sapiens
  Table A; HLA-B*39:06; TP53; I195T; 0
TRVEGNLRV

SEQ ID NO: 19011 - protein, 9 aa, Homo sapiens
  Table A; HLA-C*06:02; TP53; I195T; 1
TRVEGNLRV

SEQ ID NO: 19012 - protein, 11 aa, Homo sapiens
  Table A; HLA-B*27:02; TP53; I195T; 0
TRVEGNLRVEY

SEQ ID NO: 19013 - protein, 11 aa, Homo sapiens
  Table A; HLA-B*27:05; TP53; I195T; 1
TRVEGNLRVEY

SEQ ID NO: 19014 - protein, 11 aa, Homo sapiens
  Table A; HLA-C*16:04; TP53; I195T; 0
TRVEGNLRVEY

SEQ ID NO: 19015 - protein, 9 aa, Homo sapiens
  Table A; HLA-B*27:02; TP53; R158H; 0
TRVHAMAIY

SEQ ID NO: 19016 - protein, 9 aa, Homo sapiens
  Table A; HLA-A*31:01; GRIN2A; R1067W; 0
TSNWATCHR

SEQ ID NO: 19017 - protein, 9 aa, Homo sapiens
  Table A; HLA-A*33:03; GRIN2A; R1067W; 0
TSNWATCHR

SEQ ID NO: 19018 - protein, 8 aa, Homo sapiens
  Table A; HLA-B*51:01; TP53; P151S; 0
TSPPGTRV

SEQ ID NO: 19019 - protein, 8 aa, Homo sapiens
  Table A; HLA-C*01:02; TP53; P151S; 0
TSPPGTRV

SEQ ID NO: 19020 - protein, 9 aa, Homo sapiens
  Table A; HLA-A*26:03; TP53; P151S; 0
TSPPGTRVR

SEQ ID NO: 19021 - protein, 9 aa, Homo sapiens
  Table A; HLA-A*31:01; TP53; P151S; 0
TSPPGTRVR

SEQ ID NO: 19022 - protein, 9 aa, Homo sapiens
  Table A; HLA-A*33:03; TP53; P151S; 0
TSPPGTRVR

SEQ ID NO: 19023 - protein, 9 aa, Homo sapiens
  Table A; HLA-A*68:01; TP53; P151S; 0
TSPPGTRVR

SEQ ID NO: 19024 - protein, 9 aa, Homo sapiens
  Table A; HLA-C*15:02; STAG2; R370Q; 0
TSQFKDRIV

SEQ ID NO: 19025 - protein, 9 aa, Homo sapiens
  Table A; HLA-C*16:01; STAG2; R370Q; 0
TSQFKDRIV

SEQ ID NO: 19026 - protein, 11 aa, Homo sapiens
  Table A; HLA-B*08:01; STAG2; R370Q; 0
TSQFKDRIVSM

SEQ ID NO: 19027 - protein, 10 aa, Homo sapiens
  Table A; HLA-A*02:01; NT5C2; R8Q; 1
TSWSDQLQNA

SEQ ID NO: 19028 - protein, 10 aa, Homo sapiens
  Table A; HLA-C*08:03; NT5C2; R8Q; 0
TSWSDQLQNA

SEQ ID NO: 19029 - protein, 9 aa, Homo sapiens
  Table A; HLA-A*02:03; CTNNB1; S45F; 0
TTAPFLSGK

SEQ ID NO: 19030 - protein, 9 aa, Homo sapiens
  Table A; HLA-A*03:01; CTNNB1; S45F; 1
TTAPFLSGK

SEQ ID NO: 19031 - protein, 9 aa, Homo sapiens
  Table A; HLA-A*03:02; CTNNB1; S45F; 0
TTAPFLSGK

SEQ ID NO: 19032 - protein, 9 aa, Homo sapiens
  Table A; HLA-A*11:01; CTNNB1; S45F; 1
TTAPFLSGK

SEQ ID NO: 19033 - protein, 9 aa, Homo sapiens
  Table A; HLA-A*26:01; CTNNB1; S45F; 0
TTAPFLSGK

SEQ ID NO: 19034 - protein, 9 aa, Homo sapiens
  Table A; HLA-A*26:03; CTNNB1; S45F; 0
TTAPFLSGK

SEQ ID NO: 19035 - protein, 9 aa, Homo sapiens
  Table A; HLA-A*30:01; CTNNB1; S45F; 0
TTAPFLSGK

SEQ ID NO: 19036 - protein, 9 aa, Homo sapiens
  Table A; HLA-A*31:01; CTNNB1; S45F; 0
TTAPFLSGK

SEQ ID NO: 19037 - protein, 9 aa, Homo sapiens
  Table A; HLA-A*33:01; CTNNB1; S45F; 0
TTAPFLSGK

SEQ ID NO: 19038 - protein, 9 aa, Homo sapiens
  Table A; HLA-A*33:03; CTNNB1; S45F; 0
TTAPFLSGK

SEQ ID NO: 19039 - protein, 9 aa, Homo sapiens
  Table A; HLA-A*68:01; CTNNB1; S45F; 0
TTAPFLSGK

SEQ ID NO: 19040 - protein, 9 aa, Homo sapiens
  Table A; HLA-A*68:02; CTNNB1; S45F; 0
TTAPFLSGK

SEQ ID NO: 19041 - protein, 9 aa, Homo sapiens
  Table A; HLA-B*27:02; CTNNB1; S45F; 0
TTAPFLSGK

SEQ ID NO: 19042 - protein, 9 aa, Homo sapiens
  Table A; HLA-B*27:05; CTNNB1; S45F; 0
TTAPFLSGK

SEQ ID NO: 19043 - protein, 9 aa, Homo sapiens
  Table A; HLA-B*35:01; CTNNB1; S45F; 1
TTAPFLSGK

SEQ ID NO: 19044 - protein, 9 aa, Homo sapiens
  Table A; HLA-B*57:01; CTNNB1; S45F; 1
TTAPFLSGK

SEQ ID NO: 19045 - protein, 9 aa, Homo sapiens
  Table A; HLA-B*58:01; CTNNB1; S45F; 0
TTAPFLSGK

SEQ ID NO: 19046 - protein, 10 aa, Homo sapiens
  Table A; HLA-A*02:03; CTNNB1; S45F; 0
TTAPFLSGKG

SEQ ID NO: 19047 - protein, 10 aa, Homo sapiens
  Table A; HLA-A*02:05; CTNNB1; S45F; 0
TTAPFLSGKG

SEQ ID NO: 19048 - protein, 10 aa, Homo sapiens
  Table A; HLA-A*03:01; CTNNB1; S45F; 1
TTAPFLSGKG

SEQ ID NO: 19049 - protein, 10 aa, Homo sapiens
  Table A; HLA-A*11:01; CTNNB1; S45F; 1
TTAPFLSGKG

SEQ ID NO: 19050 - protein, 10 aa, Homo sapiens
  Table A; HLA-A*26:01; CTNNB1; S45F; 0
TTAPFLSGKG

SEQ ID NO: 19051 - protein, 10 aa, Homo sapiens
  Table A; HLA-A*29:02; CTNNB1; S45F; 0
TTAPFLSGKG

SEQ ID NO: 19052 - protein, 10 aa, Homo sapiens
  Table A; HLA-A*33:03; CTNNB1; S45F; 0
TTAPFLSGKG

SEQ ID NO: 19053 - protein, 10 aa, Homo sapiens
  Table A; HLA-A*68:01; CTNNB1; S45F; 0
TTAPFLSGKG

SEQ ID NO: 19054 - protein, 10 aa, Homo sapiens
  Table A; HLA-A*68:02; CTNNB1; S45F; 0
TTAPFLSGKG

SEQ ID NO: 19055 - protein, 8 aa, Homo sapiens
  Table A; HLA-B*48:01; CTNNB1; S45P; 0
TTAPPLSG

SEQ ID NO: 19056 - protein, 9 aa, Homo sapiens
  Table A; HLA-A*02:01; CTNNB1; S45P; 1
TTAPPLSGK

SEQ ID NO: 19057 - protein, 9 aa, Homo sapiens
  Table A; HLA-A*02:03; CTNNB1; S45P; 0
TTAPPLSGK

SEQ ID NO: 19058 - protein, 9 aa, Homo sapiens
  Table A; HLA-A*02:05; CTNNB1; S45P; 0
TTAPPLSGK

SEQ ID NO: 19059 - protein, 9 aa, Homo sapiens
  Table A; HLA-A*02:06; CTNNB1; S45P; 0
TTAPPLSGK

SEQ ID NO: 19060 - protein, 9 aa, Homo sapiens
  Table A; HLA-A*02:08; CTNNB1; S45P; 0
TTAPPLSGK

SEQ ID NO: 19061 - protein, 9 aa, Homo sapiens
  Table A; HLA-A*03:01; CTNNB1; S45P; 1
TTAPPLSGK

SEQ ID NO: 19062 - protein, 9 aa, Homo sapiens
  Table A; HLA-A*03:02; CTNNB1; S45P; 0
TTAPPLSGK

SEQ ID NO: 19063 - protein, 9 aa, Homo sapiens
  Table A; HLA-A*11:01; CTNNB1; S45P; 1
TTAPPLSGK

SEQ ID NO: 19064 - protein, 9 aa, Homo sapiens
  Table A; HLA-A*25:01; CTNNB1; S45P; 1
TTAPPLSGK

SEQ ID NO: 19065 - protein, 9 aa, Homo sapiens
  Table A; HLA-A*26:01; CTNNB1; S45P; 1
TTAPPLSGK

SEQ ID NO: 19066 - protein, 9 aa, Homo sapiens
  Table A; HLA-A*26:03; CTNNB1; S45P; 0
TTAPPLSGK

SEQ ID NO: 19067 - protein, 9 aa, Homo sapiens
  Table A; HLA-A*30:01; CTNNB1; S45P; 1
TTAPPLSGK

SEQ ID NO: 19068 - protein, 9 aa, Homo sapiens
  Table A; HLA-A*31:01; CTNNB1; S45P; 1
TTAPPLSGK

SEQ ID NO: 19069 - protein, 9 aa, Homo sapiens
  Table A; HLA-A*33:01; CTNNB1; S45P; 0
TTAPPLSGK

SEQ ID NO: 19070 - protein, 9 aa, Homo sapiens
  Table A; HLA-A*33:03; CTNNB1; S45P; 0
TTAPPLSGK

SEQ ID NO: 19071 - protein, 9 aa, Homo sapiens
  Table A; HLA-A*68:01; CTNNB1; S45P; 1
TTAPPLSGK

SEQ ID NO: 19072 - protein, 9 aa, Homo sapiens
  Table A; HLA-A*68:02; CTNNB1; S45P; 0
TTAPPLSGK

SEQ ID NO: 19073 - protein, 9 aa, Homo sapiens
  Table A; HLA-B*07:02; CTNNB1; S45P; 1
TTAPPLSGK

SEQ ID NO: 19074 - protein, 9 aa, Homo sapiens
  Table A; HLA-B*13:02; CTNNB1; S45P; 1
TTAPPLSGK

SEQ ID NO: 19075 - protein, 9 aa, Homo sapiens
  Table A; HLA-B*15:01; CTNNB1; S45P; 1
TTAPPLSGK

SEQ ID NO: 19076 - protein, 9 aa, Homo sapiens
  Table A; HLA-B*15:02; CTNNB1; S45P; 0
TTAPPLSGK

SEQ ID NO: 19077 - protein, 9 aa, Homo sapiens
  Table A; HLA-B*27:02; CTNNB1; S45P; 0
TTAPPLSGK

SEQ ID NO: 19078 - protein, 9 aa, Homo sapiens
  Table A; HLA-B*27:05; CTNNB1; S45P; 1
TTAPPLSGK

SEQ ID NO: 19079 - protein, 9 aa, Homo sapiens
  Table A; HLA-B*35:01; CTNNB1; S45P; 1
TTAPPLSGK

SEQ ID NO: 19080 - protein, 9 aa, Homo sapiens
  Table A; HLA-B*46:01; CTNNB1; S45P; 0
TTAPPLSGK

SEQ ID NO: 19081 - protein, 9 aa, Homo sapiens
  Table A; HLA-B*54:01; CTNNB1; S45P; 0
TTAPPLSGK

SEQ ID NO: 19082 - protein, 9 aa, Homo sapiens
  Table A; HLA-B*57:01; CTNNB1; S45P; 1
TTAPPLSGK

SEQ ID NO: 19083 - protein, 9 aa, Homo sapiens
  Table A; HLA-B*58:01; CTNNB1; S45P; 0
TTAPPLSGK

SEQ ID NO: 19084 - protein, 9 aa, Homo sapiens
  Table A; HLA-C*03:02; CTNNB1; S45P; 0
TTAPPLSGK

SEQ ID NO: 19085 - protein, 9 aa, Homo sapiens
  Table A; HLA-C*08:01; CTNNB1; S45P; 0
TTAPPLSGK

SEQ ID NO: 19086 - protein, 10 aa, Homo sapiens
  Table A; HLA-A*02:05; CTNNB1; S45P; 0
TTAPPLSGKG

SEQ ID NO: 19087 - protein, 10 aa, Homo sapiens
  Table A; HLA-A*03:01; CTNNB1; S45P; 1
TTAPPLSGKG

SEQ ID NO: 19088 - protein, 10 aa, Homo sapiens
  Table A; HLA-A*11:01; CTNNB1; S45P; 1
TTAPPLSGKG

SEQ ID NO: 19089 - protein, 10 aa, Homo sapiens
  Table A; HLA-A*26:01; CTNNB1; S45P; 1
TTAPPLSGKG

SEQ ID NO: 19090 - protein, 10 aa, Homo sapiens
  Table A; HLA-A*29:02; CTNNB1; S45P; 1
TTAPPLSGKG

SEQ ID NO: 19091 - protein, 10 aa, Homo sapiens
  Table A; HLA-A*33:03; CTNNB1; S45P; 0
TTAPPLSGKG

SEQ ID NO: 19092 - protein, 10 aa, Homo sapiens
  Table A; HLA-A*68:01; CTNNB1; S45P; 1
TTAPPLSGKG

SEQ ID NO: 19093 - protein, 10 aa, Homo sapiens
  Table A; HLA-A*68:02; CTNNB1; S45P; 0
TTAPPLSGKG

SEQ ID NO: 19094 - protein, 10 aa, Homo sapiens
  Table A; HLA-B*48:01; CTNNB1; S45P; 0
TTAPPLSGKG

SEQ ID NO: 19095 - protein, 11 aa, Homo sapiens
  Table A; HLA-A*68:01; CTNNB1; S45P; 1
TTAPPLSGKGN

SEQ ID NO: 19096 - protein, 9 aa, Homo sapiens
  Table A; HLA-A*68:02; TP53; M237I; 0
TTIHYNYIC

SEQ ID NO: 19097 - protein, 9 aa, Homo sapiens
  Table A; HLA-A*68:02; TP53; C238F; 0
TTIHYNYMF

SEQ ID NO: 19098 - protein, 9 aa, Homo sapiens
  Table A; HLA-B*57:01; TP53; C238F; 0
TTIHYNYMF

SEQ ID NO: 19099 - protein, 9 aa, Homo sapiens
  Table A; HLA-A*29:01; TP53; C238Y; 0
TTIHYNYMY

SEQ ID NO: 19100 - protein, 9 aa, Homo sapiens
  Table A; HLA-A*29:02; TP53; C238Y; 0
TTIHYNYMY

SEQ ID NO: 19101 - protein, 9 aa, Homo sapiens
  Table A; HLA-B*57:01; TP53; C238Y; 0
TTIHYNYMY

SEQ ID NO: 19102 - protein, 9 aa, Homo sapiens
  Table A; HLA-A*31:01; POLE; P286R; 1
TTKLPLKFR

SEQ ID NO: 19103 - protein, 9 aa, Homo sapiens
  Table A; HLA-A*33:01; POLE; P286R; 0
TTKLPLKFR

SEQ ID NO: 19104 - protein, 9 aa, Homo sapiens
  Table A; HLA-A*33:03; POLE; P286R; 0
TTKLPLKFR

SEQ ID NO: 19105 - protein, 9 aa, Homo sapiens
  Table A; HLA-A*01:01; RAC1; P29L; 1
TTNAFLGEY

SEQ ID NO: 19106 - protein, 9 aa, Homo sapiens
  Table A; HLA-A*03:01; RAC1; P29L; 1
TTNAFLGEY

SEQ ID NO: 19107 - protein, 9 aa, Homo sapiens
  Table A; HLA-A*03:02; RAC1; P29L; 0
TTNAFLGEY

SEQ ID NO: 19108 - protein, 9 aa, Homo sapiens
  Table A; HLA-A*11:01; RAC1; P29L; 1
TTNAFLGEY

SEQ ID NO: 19109 - protein, 9 aa, Homo sapiens
  Table A; HLA-A*25:01; RAC1; P29L; 0
TTNAFLGEY

SEQ ID NO: 19110 - protein, 9 aa, Homo sapiens
  Table A; HLA-A*26:01; RAC1; P29L; 0
TTNAFLGEY

SEQ ID NO: 19111 - protein, 9 aa, Homo sapiens
  Table A; HLA-A*26:02; RAC1; P29L; 0
TTNAFLGEY

SEQ ID NO: 19112 - protein, 9 aa, Homo sapiens
  Table A; HLA-A*26:03; RAC1; P29L; 0
TTNAFLGEY

SEQ ID NO: 19113 - protein, 9 aa, Homo sapiens
  Table A; HLA-A*29:01; RAC1; P29L; 0
TTNAFLGEY

SEQ ID NO: 19114 - protein, 9 aa, Homo sapiens
  Table A; HLA-A*29:02; RAC1; P29L; 0
TTNAFLGEY

SEQ ID NO: 19115 - protein, 9 aa, Homo sapiens
  Table A; HLA-A*30:02; RAC1; P29L; 0
TTNAFLGEY

SEQ ID NO: 19116 - protein, 9 aa, Homo sapiens
  Table A; HLA-A*30:04; RAC1; P29L; 0
TTNAFLGEY

SEQ ID NO: 19117 - protein, 9 aa, Homo sapiens
  Table A; HLA-A*31:01; RAC1; P29L; 0
TTNAFLGEY

SEQ ID NO: 19118 - protein, 9 aa, Homo sapiens
  Table A; HLA-A*33:01; RAC1; P29L; 0
TTNAFLGEY

SEQ ID NO: 19119 - protein, 9 aa, Homo sapiens
  Table A; HLA-A*33:03; RAC1; P29L; 0
TTNAFLGEY

SEQ ID NO: 19120 - protein, 9 aa, Homo sapiens
  Table A; HLA-A*68:01; RAC1; P29L; 0
TTNAFLGEY

SEQ ID NO: 19121 - protein, 9 aa, Homo sapiens
  Table A; HLA-A*68:02; RAC1; P29L; 0
TTNAFLGEY

SEQ ID NO: 19122 - protein, 9 aa, Homo sapiens
  Table A; HLA-B*15:01; RAC1; P29L; 1
TTNAFLGEY

SEQ ID NO: 19123 - protein, 9 aa, Homo sapiens
  Table A; HLA-B*15:02; RAC1; P29L; 0
TTNAFLGEY

SEQ ID NO: 19124 - protein, 9 aa, Homo sapiens
  Table A; HLA-B*15:03; RAC1; P29L; 0
TTNAFLGEY

SEQ ID NO: 19125 - protein, 9 aa, Homo sapiens
  Table A; HLA-B*27:02; RAC1; P29L; 0
TTNAFLGEY

SEQ ID NO: 19126 - protein, 9 aa, Homo sapiens
  Table A; HLA-B*35:01; RAC1; P29L; 1
TTNAFLGEY

SEQ ID NO: 19127 - protein, 9 aa, Homo sapiens
  Table A; HLA-B*35:08; RAC1; P29L; 0
TTNAFLGEY

SEQ ID NO: 19128 - protein, 9 aa, Homo sapiens
  Table A; HLA-B*39:01; RAC1; P29L; 0
TTNAFLGEY

SEQ ID NO: 19129 - protein, 9 aa, Homo sapiens
  Table A; HLA-B*46:01; RAC1; P29L; 0
TTNAFLGEY

SEQ ID NO: 19130 - protein, 9 aa, Homo sapiens
  Table A; HLA-B*57:01; RAC1; P29L; 0
TTNAFLGEY

SEQ ID NO: 19131 - protein, 9 aa, Homo sapiens
  Table A; HLA-B*58:01; RAC1; P29L; 0
TTNAFLGEY

SEQ ID NO: 19132 - protein, 9 aa, Homo sapiens
  Table A; HLA-C*02:02; RAC1; P29L; 0
TTNAFLGEY

SEQ ID NO: 19133 - protein, 9 aa, Homo sapiens
  Table A; HLA-C*03:02; RAC1; P29L; 0
TTNAFLGEY

SEQ ID NO: 19134 - protein, 9 aa, Homo sapiens
  Table A; HLA-C*08:01; RAC1; P29L; 0
TTNAFLGEY

SEQ ID NO: 19135 - protein, 9 aa, Homo sapiens
  Table A; HLA-C*16:01; RAC1; P29L; 0
TTNAFLGEY

SEQ ID NO: 19136 - protein, 9 aa, Homo sapiens
  Table A; HLA-C*16:04; RAC1; P29L; 0
TTNAFLGEY

SEQ ID NO: 19137 - protein, 10 aa, Homo sapiens
  Table A; HLA-A*68:02; RAC1; P29L; 0
TTNAFLGEYI

SEQ ID NO: 19138 - protein, 9 aa, Homo sapiens
  Table A; HLA-A*01:01; RAC1; P29S; 1
TTNAFSGEY

SEQ ID NO: 19139 - protein, 9 aa, Homo sapiens
  Table A; HLA-A*03:01; RAC1; P29S; 1
TTNAFSGEY

SEQ ID NO: 19140 - protein, 9 aa, Homo sapiens
  Table A; HLA-A*03:02; RAC1; P29S; 0
TTNAFSGEY

SEQ ID NO: 19141 - protein, 9 aa, Homo sapiens
  Table A; HLA-A*11:01; RAC1; P29S; 1
TTNAFSGEY

SEQ ID NO: 19142 - protein, 9 aa, Homo sapiens
  Table A; HLA-A*25:01; RAC1; P29S; 1
TTNAFSGEY

SEQ ID NO: 19143 - protein, 9 aa, Homo sapiens
  Table A; HLA-A*26:01; RAC1; P29S; 1
TTNAFSGEY

SEQ ID NO: 19144 - protein, 9 aa, Homo sapiens
  Table A; HLA-A*26:02; RAC1; P29S; 0
TTNAFSGEY

SEQ ID NO: 19145 - protein, 9 aa, Homo sapiens
  Table A; HLA-A*26:03; RAC1; P29S; 0
TTNAFSGEY

SEQ ID NO: 19146 - protein, 9 aa, Homo sapiens
  Table A; HLA-A*29:01; RAC1; P29S; 0
TTNAFSGEY

SEQ ID NO: 19147 - protein, 9 aa, Homo sapiens
  Table A; HLA-A*29:02; RAC1; P29S; 1
TTNAFSGEY

SEQ ID NO: 19148 - protein, 9 aa, Homo sapiens
  Table A; HLA-A*30:02; RAC1; P29S; 0
TTNAFSGEY

SEQ ID NO: 19149 - protein, 9 aa, Homo sapiens
  Table A; HLA-A*30:04; RAC1; P29S; 0
TTNAFSGEY

SEQ ID NO: 19150 - protein, 9 aa, Homo sapiens
  Table A; HLA-A*31:01; RAC1; P29S; 1
TTNAFSGEY

SEQ ID NO: 19151 - protein, 9 aa, Homo sapiens
  Table A; HLA-A*32:01; RAC1; P29S; 1
TTNAFSGEY

SEQ ID NO: 19152 - protein, 9 aa, Homo sapiens
  Table A; HLA-A*33:03; RAC1; P29S; 0
TTNAFSGEY

SEQ ID NO: 19153 - protein, 9 aa, Homo sapiens
  Table A; HLA-A*68:01; RAC1; P29S; 1
TTNAFSGEY

SEQ ID NO: 19154 - protein, 9 aa, Homo sapiens
  Table A; HLA-B*15:01; RAC1; P29S; 1
TTNAFSGEY

SEQ ID NO: 19155 - protein, 9 aa, Homo sapiens
  Table A; HLA-B*15:02; RAC1; P29S; 0
TTNAFSGEY

SEQ ID NO: 19156 - protein, 9 aa, Homo sapiens
  Table A; HLA-B*15:03; RAC1; P29S; 0
TTNAFSGEY

SEQ ID NO: 19157 - protein, 9 aa, Homo sapiens
  Table A; HLA-B*15:13; RAC1; P29S; 0
TTNAFSGEY

SEQ ID NO: 19158 - protein, 9 aa, Homo sapiens
  Table A; HLA-B*18:01; RAC1; P29S; 1
TTNAFSGEY

SEQ ID NO: 19159 - protein, 9 aa, Homo sapiens
  Table A; HLA-B*27:02; RAC1; P29S; 0
TTNAFSGEY

SEQ ID NO: 19160 - protein, 9 aa, Homo sapiens
  Table A; HLA-B*35:01; RAC1; P29S; 1
TTNAFSGEY

SEQ ID NO: 19161 - protein, 9 aa, Homo sapiens
  Table A; HLA-B*35:08; RAC1; P29S; 0
TTNAFSGEY

SEQ ID NO: 19162 - protein, 9 aa, Homo sapiens
  Table A; HLA-B*39:01; RAC1; P29S; 0
TTNAFSGEY

SEQ ID NO: 19163 - protein, 9 aa, Homo sapiens
  Table A; HLA-B*44:03; RAC1; P29S; 1
TTNAFSGEY

SEQ ID NO: 19164 - protein, 9 aa, Homo sapiens
  Table A; HLA-B*46:01; RAC1; P29S; 0
TTNAFSGEY

SEQ ID NO: 19165 - protein, 9 aa, Homo sapiens
  Table A; HLA-B*48:01; RAC1; P29S; 0
TTNAFSGEY

SEQ ID NO: 19166 - protein, 9 aa, Homo sapiens
  Table A; HLA-B*57:01; RAC1; P29S; 1
TTNAFSGEY

SEQ ID NO: 19167 - protein, 9 aa, Homo sapiens
  Table A; HLA-B*58:01; RAC1; P29S; 0
TTNAFSGEY

SEQ ID NO: 19168 - protein, 9 aa, Homo sapiens
  Table A; HLA-C*02:02; RAC1; P29S; 1
TTNAFSGEY

SEQ ID NO: 19169 - protein, 9 aa, Homo sapiens
  Table A; HLA-C*03:02; RAC1; P29S; 0
TTNAFSGEY

SEQ ID NO: 19170 - protein, 9 aa, Homo sapiens
  Table A; HLA-C*08:01; RAC1; P29S; 0
TTNAFSGEY

SEQ ID NO: 19171 - protein, 9 aa, Homo sapiens
  Table A; HLA-C*16:01; RAC1; P29S; 1
TTNAFSGEY

SEQ ID NO: 19172 - protein, 9 aa, Homo sapiens
  Table A; HLA-C*16:04; RAC1; P29S; 0
TTNAFSGEY

SEQ ID NO: 19173 - protein, 10 aa, Homo sapiens
  Table A; HLA-A*68:01; RAC1; P29S; 1
TTNAFSGEYI

SEQ ID NO: 19174 - protein, 10 aa, Homo sapiens
  Table A; HLA-A*68:02; RAC1; P29S; 0
TTNAFSGEYI

SEQ ID NO: 19175 - protein, 9 aa, Homo sapiens
  Table A; HLA-A*03:01; CTNNB1; S45F; 1
TTTAPFLSG

SEQ ID NO: 19176 - protein, 9 aa, Homo sapiens
  Table A; HLA-A*11:01; CTNNB1; S45F; 1
TTTAPFLSG

SEQ ID NO: 19177 - protein, 9 aa, Homo sapiens
  Table A; HLA-A*30:01; CTNNB1; S45F; 0
TTTAPFLSG

SEQ ID NO: 19178 - protein, 9 aa, Homo sapiens
  Table A; HLA-A*31:01; CTNNB1; S45F; 0
TTTAPFLSG

SEQ ID NO: 19179 - protein, 9 aa, Homo sapiens
  Table A; HLA-A*33:01; CTNNB1; S45F; 0
TTTAPFLSG

SEQ ID NO: 19180 - protein, 9 aa, Homo sapiens
  Table A; HLA-A*33:03; CTNNB1; S45F; 0
TTTAPFLSG

SEQ ID NO: 19181 - protein, 9 aa, Homo sapiens
  Table A; HLA-A*68:01; CTNNB1; S45F; 0
TTTAPFLSG

SEQ ID NO: 19182 - protein, 9 aa, Homo sapiens
  Table A; HLA-A*68:02; CTNNB1; S45F; 0
TTTAPFLSG

SEQ ID NO: 19183 - protein, 9 aa, Homo sapiens
  Table A; HLA-B*07:02; CTNNB1; S45F; 1
TTTAPFLSG

SEQ ID NO: 19184 - protein, 9 aa, Homo sapiens
  Table A; HLA-B*54:01; CTNNB1; S45F; 0
TTTAPFLSG

SEQ ID NO: 19185 - protein, 9 aa, Homo sapiens
  Table A; HLA-B*58:01; CTNNB1; S45F; 0
TTTAPFLSG

SEQ ID NO: 19186 - protein, 10 aa, Homo sapiens
  Table A; HLA-A*03:01; CTNNB1; S45F; 1
TTTAPFLSGK

SEQ ID NO: 19187 - protein, 10 aa, Homo sapiens
  Table A; HLA-A*03:02; CTNNB1; S45F; 0
TTTAPFLSGK

SEQ ID NO: 19188 - protein, 10 aa, Homo sapiens
  Table A; HLA-A*11:01; CTNNB1; S45F; 1
TTTAPFLSGK

SEQ ID NO: 19189 - protein, 10 aa, Homo sapiens
  Table A; HLA-A*26:03; CTNNB1; S45F; 0
TTTAPFLSGK

SEQ ID NO: 19190 - protein, 10 aa, Homo sapiens
  Table A; HLA-A*31:01; CTNNB1; S45F; 0
TTTAPFLSGK

SEQ ID NO: 19191 - protein, 10 aa, Homo sapiens
  Table A; HLA-A*33:03; CTNNB1; S45F; 0
TTTAPFLSGK

SEQ ID NO: 19192 - protein, 10 aa, Homo sapiens
  Table A; HLA-A*68:01; CTNNB1; S45F; 0
TTTAPFLSGK

SEQ ID NO: 19193 - protein, 10 aa, Homo sapiens
  Table A; HLA-A*68:02; CTNNB1; S45F; 0
TTTAPFLSGK

SEQ ID NO: 19194 - protein, 9 aa, Homo sapiens
  Table A; HLA-A*30:01; CTNNB1; S45P; 1
TTTAPPLSG

SEQ ID NO: 19195 - protein, 9 aa, Homo sapiens
  Table A; HLA-A*31:01; CTNNB1; S45P; 1
TTTAPPLSG

SEQ ID NO: 19196 - protein, 9 aa, Homo sapiens
  Table A; HLA-A*33:03; CTNNB1; S45P; 0
TTTAPPLSG

SEQ ID NO: 19197 - protein, 9 aa, Homo sapiens
  Table A; HLA-A*68:01; CTNNB1; S45P; 1
TTTAPPLSG

SEQ ID NO: 19198 - protein, 9 aa, Homo sapiens
  Table A; HLA-B*54:01; CTNNB1; S45P; 0
TTTAPPLSG

SEQ ID NO: 19199 - protein, 9 aa, Homo sapiens
  Table A; HLA-B*58:01; CTNNB1; S45P; 0
TTTAPPLSG

SEQ ID NO: 19200 - protein, 10 aa, Homo sapiens
  Table A; HLA-A*03:01; CTNNB1; S45P; 1
TTTAPPLSGK

SEQ ID NO: 19201 - protein, 10 aa, Homo sapiens
  Table A; HLA-A*03:02; CTNNB1; S45P; 0
TTTAPPLSGK

SEQ ID NO: 19202 - protein, 10 aa, Homo sapiens
  Table A; HLA-A*11:01; CTNNB1; S45P; 1
TTTAPPLSGK

SEQ ID NO: 19203 - protein, 10 aa, Homo sapiens
  Table A; HLA-A*26:01; CTNNB1; S45P; 1
TTTAPPLSGK

SEQ ID NO: 19204 - protein, 10 aa, Homo sapiens
  Table A; HLA-A*26:03; CTNNB1; S45P; 0
TTTAPPLSGK

SEQ ID NO: 19205 - protein, 10 aa, Homo sapiens
  Table A; HLA-A*31:01; CTNNB1; S45P; 1
TTTAPPLSGK

SEQ ID NO: 19206 - protein, 10 aa, Homo sapiens
  Table A; HLA-A*33:01; CTNNB1; S45P; 0
TTTAPPLSGK

SEQ ID NO: 19207 - protein, 10 aa, Homo sapiens
  Table A; HLA-A*33:03; CTNNB1; S45P; 0
TTTAPPLSGK

SEQ ID NO: 19208 - protein, 10 aa, Homo sapiens
  Table A; HLA-A*68:01; CTNNB1; S45P; 1
TTTAPPLSGK

SEQ ID NO: 19209 - protein, 10 aa, Homo sapiens
  Table A; HLA-A*68:02; CTNNB1; S45P; 0
TTTAPPLSGK

SEQ ID NO: 19210 - protein, 10 aa, Homo sapiens
  Table A; HLA-B*27:02; CTNNB1; S45P; 0
TTTAPPLSGK

SEQ ID NO: 19211 - protein, 11 aa, Homo sapiens
  Table A; HLA-A*11:01; CTNNB1; S45P; 1
TTTAPPLSGKG

SEQ ID NO: 19212 - protein, 11 aa, Homo sapiens
  Table A; HLA-A*29:02; CTNNB1; S45P; 1
TTTAPPLSGKG

SEQ ID NO: 19213 - protein, 11 aa, Homo sapiens
  Table A; HLA-A*68:02; CTNNB1; S45P; 0
TTTAPPLSGKG

SEQ ID NO: 19214 - protein, 8 aa, Homo sapiens
  Table A; HLA-C*17:01; ACVR1; R206H; 0
TVAHQITL

SEQ ID NO: 19215 - protein, 9 aa, Homo sapiens
  Table A; HLA-A*02:03; ACVR1; R206H; 0
TVAHQITLL

SEQ ID NO: 19216 - protein, 9 aa, Homo sapiens
  Table A; HLA-A*02:04; ACVR1; R206H; 0
TVAHQITLL

SEQ ID NO: 19217 - protein, 9 aa, Homo sapiens
  Table A; HLA-A*02:05; ACVR1; R206H; 0
TVAHQITLL

SEQ ID NO: 19218 - protein, 9 aa, Homo sapiens
  Table A; HLA-A*02:06; ACVR1; R206H; 0
TVAHQITLL

SEQ ID NO: 19219 - protein, 9 aa, Homo sapiens
  Table A; HLA-A*02:08; ACVR1; R206H; 0
TVAHQITLL

SEQ ID NO: 19220 - protein, 9 aa, Homo sapiens
  Table A; HLA-A*26:01; ACVR1; R206H; 0
TVAHQITLL

SEQ ID NO: 19221 - protein, 9 aa, Homo sapiens
  Table A; HLA-A*26:02; ACVR1; R206H; 0
TVAHQITLL

SEQ ID NO: 19222 - protein, 9 aa, Homo sapiens
  Table A; HLA-A*68:01; ACVR1; R206H; 0
TVAHQITLL

SEQ ID NO: 19223 - protein, 9 aa, Homo sapiens
  Table A; HLA-A*68:02; ACVR1; R206H; 0
TVAHQITLL

SEQ ID NO: 19224 - protein, 9 aa, Homo sapiens
  Table A; HLA-B*50:01; ACVR1; R206H; 0
TVAHQITLL

SEQ ID NO: 19225 - protein, 9 aa, Homo sapiens
  Table A; HLA-C*17:01; ACVR1; R206H; 0
TVAHQITLL

SEQ ID NO: 19226 - protein, 9 aa, Homo sapiens
  Table A; HLA-C*08:03; FAM135B; S11L; 0
TVEFLVELH

SEQ ID NO: 19227 - protein, 8 aa, Homo sapiens
  Table A; HLA-B*39:06; RHOA; Y42C; 0
TVFENCVA

SEQ ID NO: 19228 - protein, 10 aa, Homo sapiens
  Table A; HLA-A*68:02; RHOA; Y42C; 0
TVFENCVADI

SEQ ID NO: 19229 - protein, 9 aa, Homo sapiens
  Table A; HLA-A*02:03; BRAF; G466V; 0
TVGQRIGSV

SEQ ID NO: 19230 - protein, 9 aa, Homo sapiens
  Table A; HLA-A*02:04; XPO1; E571K; 0
TVVNKLFKF

SEQ ID NO: 19231 - protein, 9 aa, Homo sapiens
  Table A; HLA-A*23:01; XPO1; E571K; 0
TVVNKLFKF

SEQ ID NO: 19232 - protein, 9 aa, Homo sapiens
  Table A; HLA-A*24:02; XPO1; E571K; 1
TVVNKLFKF

SEQ ID NO: 19233 - protein, 9 aa, Homo sapiens
  Table A; HLA-A*26:02; XPO1; E571K; 0
TVVNKLFKF

SEQ ID NO: 19234 - protein, 9 aa, Homo sapiens
  Table A; HLA-A*29:02; XPO1; E571K; 0
TVVNKLFKF

SEQ ID NO: 19235 - protein, 9 aa, Homo sapiens
  Table A; HLA-A*68:02; XPO1; E571K; 0
TVVNKLFKF

SEQ ID NO: 19236 - protein, 9 aa, Homo sapiens
  Table A; HLA-B*57:01; XPO1; E571K; 0
TVVNKLFKF

SEQ ID NO: 19237 - protein, 8 aa, Homo sapiens
  Table A; HLA-A*03:01; TP53; S127F; 1
TYFPALNK

SEQ ID NO: 19238 - protein, 8 aa, Homo sapiens
  Table A; HLA-A*03:02; TP53; S127F; 0
TYFPALNK

SEQ ID NO: 19239 - protein, 8 aa, Homo sapiens
  Table A; HLA-A*11:01; TP53; S127F; 0
TYFPALNK

SEQ ID NO: 19240 - protein, 8 aa, Homo sapiens
  Table A; HLA-A*31:01; TP53; S127F; 0
TYFPALNK

SEQ ID NO: 19241 - protein, 8 aa, Homo sapiens
  Table A; HLA-A*33:03; TP53; S127F; 0
TYFPALNK

SEQ ID NO: 19242 - protein, 9 aa, Homo sapiens
  Table A; HLA-A*23:01; TP53; S127F; 0
TYFPALNKM

SEQ ID NO: 19243 - protein, 9 aa, Homo sapiens
  Table A; HLA-A*24:02; TP53; S127F; 1
TYFPALNKM

SEQ ID NO: 19244 - protein, 9 aa, Homo sapiens
  Table A; HLA-A*33:03; TP53; S127F; 0
TYFPALNKM

SEQ ID NO: 19245 - protein, 9 aa, Homo sapiens
  Table A; HLA-C*06:02; TP53; S127F; 1
TYFPALNKM

SEQ ID NO: 19246 - protein, 9 aa, Homo sapiens
  Table A; HLA-C*07:02; TP53; S127F; 1
TYFPALNKM

SEQ ID NO: 19247 - protein, 9 aa, Homo sapiens
  Table A; HLA-C*14:02; TP53; S127F; 0
TYFPALNKM

SEQ ID NO: 19248 - protein, 9 aa, Homo sapiens
  Table A; HLA-C*14:03; TP53; S127F; 0
TYFPALNKM

SEQ ID NO: 19249 - protein, 10 aa, Homo sapiens
  Table A; HLA-A*23:01; TP53; S127F; 0
TYFPALNKMF

SEQ ID NO: 19250 - protein, 10 aa, Homo sapiens
  Table A; HLA-A*24:02; TP53; S127F; 1
TYFPALNKMF

SEQ ID NO: 19251 - protein, 10 aa, Homo sapiens
  Table A; HLA-C*14:02; TP53; S127F; 0
TYFPALNKMF

SEQ ID NO: 19252 - protein, 9 aa, Homo sapiens
  Table A; HLA-A*23:01; MTOR; S2215Y; 0
TYLRKNLSI

SEQ ID NO: 19253 - protein, 11 aa, Homo sapiens
  Table A; HLA-A*33:03; MTOR; S2215Y; 0
TYLRKNLSIQR

SEQ ID NO: 19254 - protein, 8 aa, Homo sapiens
  Table A; HLA-A*33:03; PIK3CA; V344M; 0
TYMNLNIR

SEQ ID NO: 19255 - protein, 9 aa, Homo sapiens
  Table A; HLA-B*48:01; TP53; R110L; 0
TYQGSYGFL

SEQ ID NO: 19256 - protein, 9 aa, Homo sapiens
  Table A; HLA-C*14:02; TP53; R110L; 0
TYQGSYGFL

SEQ ID NO: 19257 - protein, 9 aa, Homo sapiens
  Table A; HLA-C*14:03; TP53; R110L; 0
TYQGSYGFL

SEQ ID NO: 19258 - protein, 10 aa, Homo sapiens
  Table A; HLA-A*02:04; TP53; R110L; 0
TYQGSYGFLL

SEQ ID NO: 19259 - protein, 10 aa, Homo sapiens
  Table A; HLA-A*23:01; TP53; R110L; 0
TYQGSYGFLL

SEQ ID NO: 19260 - protein, 10 aa, Homo sapiens
  Table A; HLA-A*24:02; TP53; R110L; 1
TYQGSYGFLL

SEQ ID NO: 19261 - protein, 8 aa, Homo sapiens
  Table A; HLA-A*03:02; TP53; L130F; 0
TYSPAFNK

SEQ ID NO: 19262 - protein, 8 aa, Homo sapiens
  Table A; HLA-A*11:01; TP53; L130F; 0
TYSPAFNK

SEQ ID NO: 19263 - protein, 8 aa, Homo sapiens
  Table A; HLA-A*33:01; TP53; L130F; 0
TYSPAFNK

SEQ ID NO: 19264 - protein, 8 aa, Homo sapiens
  Table A; HLA-A*33:03; TP53; L130F; 0
TYSPAFNK

SEQ ID NO: 19265 - protein, 8 aa, Homo sapiens
  Table A; HLA-A*68:01; TP53; L130F; 0
TYSPAFNK

SEQ ID NO: 19266 - protein, 9 aa, Homo sapiens
  Table A; HLA-A*23:01; TP53; L130F; 0
TYSPAFNKM

SEQ ID NO: 19267 - protein, 9 aa, Homo sapiens
  Table A; HLA-A*24:02; TP53; L130F; 0
TYSPAFNKM

SEQ ID NO: 19268 - protein, 9 aa, Homo sapiens
  Table A; HLA-A*29:02; TP53; L130F; 0
TYSPAFNKM

SEQ ID NO: 19269 - protein, 9 aa, Homo sapiens
  Table A; HLA-A*33:03; TP53; L130F; 0
TYSPAFNKM

SEQ ID NO: 19270 - protein, 9 aa, Homo sapiens
  Table A; HLA-B*35:03; TP53; L130F; 0
TYSPAFNKM

SEQ ID NO: 19271 - protein, 9 aa, Homo sapiens
  Table A; HLA-B*38:01; TP53; L130F; 0
TYSPAFNKM

SEQ ID NO: 19272 - protein, 9 aa, Homo sapiens
  Table A; HLA-B*39:01; TP53; L130F; 0
TYSPAFNKM

SEQ ID NO: 19273 - protein, 9 aa, Homo sapiens
  Table A; HLA-C*07:02; TP53; L130F; 1
TYSPAFNKM

SEQ ID NO: 19274 - protein, 9 aa, Homo sapiens
  Table A; HLA-C*14:02; TP53; L130F; 0
TYSPAFNKM

SEQ ID NO: 19275 - protein, 9 aa, Homo sapiens
  Table A; HLA-C*14:03; TP53; L130F; 0
TYSPAFNKM

SEQ ID NO: 19276 - protein, 10 aa, Homo sapiens
  Table A; HLA-A*23:01; TP53; L130F; 0
TYSPAFNKMF

SEQ ID NO: 19277 - protein, 10 aa, Homo sapiens
  Table A; HLA-A*24:02; TP53; L130F; 0
TYSPAFNKMF

SEQ ID NO: 19278 - protein, 10 aa, Homo sapiens
  Table A; HLA-B*57:01; TP53; L130F; 0
TYSPAFNKMF

SEQ ID NO: 19279 - protein, 10 aa, Homo sapiens
  Table A; HLA-C*14:02; TP53; L130F; 0
TYSPAFNKMF

SEQ ID NO: 19280 - protein, 11 aa, Homo sapiens
  Table A; HLA-A*23:01; TP53; C135F; 0
TYSPALNKMFF

SEQ ID NO: 19281 - protein, 11 aa, Homo sapiens
  Table A; HLA-A*24:02; TP53; C135F; 0
TYSPALNKMFF

SEQ ID NO: 19282 - protein, 10 aa, Homo sapiens
  Table A; HLA-A*23:01; TP53; F134L; 0
TYSPALNKML

SEQ ID NO: 19283 - protein, 10 aa, Homo sapiens
  Table A; HLA-A*24:02; TP53; F134L; 0
TYSPALNKML

SEQ ID NO: 19284 - protein, 10 aa, Homo sapiens
  Table A; HLA-C*14:02; TP53; F134L; 0
TYSPALNKML

SEQ ID NO: 19285 - protein, 9 aa, Homo sapiens
  Table A; HLA-A*23:01; TP53; K132N; 0
TYSPALNNM

SEQ ID NO: 19286 - protein, 9 aa, Homo sapiens
  Table A; HLA-A*24:02; TP53; K132N; 0
TYSPALNNM

SEQ ID NO: 19287 - protein, 9 aa, Homo sapiens
  Table A; HLA-A*33:03; TP53; K132N; 0
TYSPALNNM

SEQ ID NO: 19288 - protein, 9 aa, Homo sapiens
  Table A; HLA-B*38:01; TP53; K132N; 0
TYSPALNNM

SEQ ID NO: 19289 - protein, 9 aa, Homo sapiens
  Table A; HLA-B*39:01; TP53; K132N; 0
TYSPALNNM

SEQ ID NO: 19290 - protein, 9 aa, Homo sapiens
  Table A; HLA-C*14:02; TP53; K132N; 0
TYSPALNNM

SEQ ID NO: 19291 - protein, 9 aa, Homo sapiens
  Table A; HLA-C*14:03; TP53; K132N; 0
TYSPALNNM

SEQ ID NO: 19292 - protein, 10 aa, Homo sapiens
  Table A; HLA-A*23:01; TP53; K132N; 0
TYSPALNNMF

SEQ ID NO: 19293 - protein, 10 aa, Homo sapiens
  Table A; HLA-A*24:02; TP53; K132N; 0
TYSPALNNMF

SEQ ID NO: 19294 - protein, 10 aa, Homo sapiens
  Table A; HLA-A*29:02; TP53; K132N; 0
TYSPALNNMF

SEQ ID NO: 19295 - protein, 10 aa, Homo sapiens
  Table A; HLA-A*31:01; TP53; K132N; 0
TYSPALNNMF

SEQ ID NO: 19296 - protein, 10 aa, Homo sapiens
  Table A; HLA-B*38:01; TP53; K132N; 0
TYSPALNNMF

SEQ ID NO: 19297 - protein, 10 aa, Homo sapiens
  Table A; HLA-B*39:01; TP53; K132N; 0
TYSPALNNMF

SEQ ID NO: 19298 - protein, 10 aa, Homo sapiens
  Table A; HLA-B*44:05; TP53; K132N; 0
TYSPALNNMF

SEQ ID NO: 19299 - protein, 10 aa, Homo sapiens
  Table A; HLA-B*57:01; TP53; K132N; 0
TYSPALNNMF

SEQ ID NO: 19300 - protein, 10 aa, Homo sapiens
  Table A; HLA-B*58:01; TP53; K132N; 0
TYSPALNNMF

SEQ ID NO: 19301 - protein, 10 aa, Homo sapiens
  Table A; HLA-C*07:02; TP53; K132N; 1
TYSPALNNMF

SEQ ID NO: 19302 - protein, 10 aa, Homo sapiens
  Table A; HLA-C*14:02; TP53; K132N; 0
TYSPALNNMF

SEQ ID NO: 19303 - protein, 10 aa, Homo sapiens
  Table A; HLA-C*14:03; TP53; K132N; 0
TYSPALNNMF

SEQ ID NO: 19304 - protein, 8 aa, Homo sapiens
  Table A; HLA-A*11:01; TP53; K132R; 0
TYSPALNR

SEQ ID NO: 19305 - protein, 8 aa, Homo sapiens
  Table A; HLA-A*31:01; TP53; K132R; 0
TYSPALNR

SEQ ID NO: 19306 - protein, 8 aa, Homo sapiens
  Table A; HLA-A*33:01; TP53; K132R; 0
TYSPALNR

SEQ ID NO: 19307 - protein, 8 aa, Homo sapiens
  Table A; HLA-A*33:03; TP53; K132R; 0
TYSPALNR

SEQ ID NO: 19308 - protein, 8 aa, Homo sapiens
  Table A; HLA-A*68:01; TP53; K132R; 0
TYSPALNR

SEQ ID NO: 19309 - protein, 8 aa, Homo sapiens
  Table A; HLA-B*27:05; TP53; K132R; 0
TYSPALNR

SEQ ID NO: 19310 - protein, 9 aa, Homo sapiens
  Table A; HLA-A*23:01; TP53; K132R; 0
TYSPALNRM

SEQ ID NO: 19311 - protein, 9 aa, Homo sapiens
  Table A; HLA-A*24:02; TP53; K132R; 1
TYSPALNRM

SEQ ID NO: 19312 - protein, 9 aa, Homo sapiens
  Table A; HLA-A*29:02; TP53; K132R; 0
TYSPALNRM

SEQ ID NO: 19313 - protein, 9 aa, Homo sapiens
  Table A; HLA-A*31:01; TP53; K132R; 0
TYSPALNRM

SEQ ID NO: 19314 - protein, 9 aa, Homo sapiens
  Table A; HLA-A*33:03; TP53; K132R; 0
TYSPALNRM

SEQ ID NO: 19315 - protein, 9 aa, Homo sapiens
  Table A; HLA-B*07:02; TP53; K132R; 1
TYSPALNRM

SEQ ID NO: 19316 - protein, 9 aa, Homo sapiens
  Table A; HLA-B*38:01; TP53; K132R; 0
TYSPALNRM

SEQ ID NO: 19317 - protein, 9 aa, Homo sapiens
  Table A; HLA-B*39:01; TP53; K132R; 0
TYSPALNRM

SEQ ID NO: 19318 - protein, 9 aa, Homo sapiens
  Table A; HLA-C*06:02; TP53; K132R; 1
TYSPALNRM

SEQ ID NO: 19319 - protein, 9 aa, Homo sapiens
  Table A; HLA-C*07:02; TP53; K132R; 1
TYSPALNRM

SEQ ID NO: 19320 - protein, 9 aa, Homo sapiens
  Table A; HLA-C*14:02; TP53; K132R; 0
TYSPALNRM

SEQ ID NO: 19321 - protein, 9 aa, Homo sapiens
  Table A; HLA-C*14:03; TP53; K132R; 0
TYSPALNRM

SEQ ID NO: 19322 - protein, 10 aa, Homo sapiens
  Table A; HLA-A*23:01; TP53; K132R; 0
TYSPALNRMF

SEQ ID NO: 19323 - protein, 10 aa, Homo sapiens
  Table A; HLA-A*24:02; TP53; K132R; 1
TYSPALNRMF

SEQ ID NO: 19324 - protein, 10 aa, Homo sapiens
  Table A; HLA-B*57:01; TP53; K132R; 0
TYSPALNRMF

SEQ ID NO: 19325 - protein, 10 aa, Homo sapiens
  Table A; HLA-C*06:02; TP53; K132R; 1
TYSPALNRMF

SEQ ID NO: 19326 - protein, 10 aa, Homo sapiens
  Table A; HLA-C*14:02; TP53; K132R; 0
TYSPALNRMF

SEQ ID NO: 19327 - protein, 9 aa, Homo sapiens
  Table A; HLA-A*23:01; CTNNB1; K335I; 0
TYTYEILLW

SEQ ID NO: 19328 - protein, 9 aa, Homo sapiens
  Table A; HLA-A*24:02; CTNNB1; K335I; 1
TYTYEILLW

SEQ ID NO: 19329 - protein, 8 aa, Homo sapiens
  Table A; HLA-A*33:03; PIK3CA; N345K; 0
TYVKLNIR

SEQ ID NO: 19330 - protein, 9 aa, Homo sapiens
  Table A; HLA-B*15:01; FBXW7; R505G; 1
VAAVGCVQY

SEQ ID NO: 19331 - protein, 9 aa, Homo sapiens
  Table A; HLA-B*15:03; FBXW7; R505G; 0
VAAVGCVQY

SEQ ID NO: 19332 - protein, 9 aa, Homo sapiens
  Table A; HLA-B*35:01; FBXW7; R505G; 1
VAAVGCVQY

SEQ ID NO: 19333 - protein, 9 aa, Homo sapiens
  Table A; HLA-B*35:08; FBXW7; R505G; 0
VAAVGCVQY

SEQ ID NO: 19334 - protein, 9 aa, Homo sapiens
  Table A; HLA-B*46:01; FBXW7; R505G; 0
VAAVGCVQY

SEQ ID NO: 19335 - protein, 9 aa, Homo sapiens
  Table A; HLA-B*58:01; FBXW7; R505G; 0
VAAVGCVQY

SEQ ID NO: 19336 - protein, 9 aa, Homo sapiens
  Table A; HLA-C*03:02; FBXW7; R505G; 0
VAAVGCVQY

SEQ ID NO: 19337 - protein, 9 aa, Homo sapiens
  Table A; HLA-C*16:01; FBXW7; R505G; 0
VAAVGCVQY

SEQ ID NO: 19338 - protein, 9 aa, Homo sapiens
  Table A; HLA-C*16:02; FBXW7; R505G; 0
VAAVGCVQY

SEQ ID NO: 19339 - protein, 11 aa, Homo sapiens
  Table A; HLA-C*08:01; SIRPA; V233I; 0
VAHITLQGDPL

SEQ ID NO: 19340 - protein, 8 aa, Homo sapiens
  Table A; HLA-C*17:01; ACVR1; R206H; 0
VAHQITLL

SEQ ID NO: 19341 - protein, 9 aa, Homo sapiens
  Table A; HLA-A*01:01; KEAP1; R470C; 1
VAVLNCLLY

SEQ ID NO: 19342 - protein, 9 aa, Homo sapiens
  Table A; HLA-B*35:01; KEAP1; R470C; 1
VAVLNCLLY

SEQ ID NO: 19343 - protein, 9 aa, Homo sapiens
  Table A; HLA-B*15:01; SF3B1; R625C; 0
VCNTTARAF

SEQ ID NO: 19344 - protein, 9 aa, Homo sapiens
  Table A; HLA-B*46:01; SF3B1; R625C; 0
VCNTTARAF

SEQ ID NO: 19345 - protein, 9 aa, Homo sapiens
  Table A; HLA-C*03:03; SF3B1; R625C; 0
VCNTTARAF

SEQ ID NO: 19346 - protein, 9 aa, Homo sapiens
  Table A; HLA-C*03:04; SF3B1; R625C; 0
VCNTTARAF

SEQ ID NO: 19347 - protein, 9 aa, Homo sapiens
  Table A; HLA-C*16:01; SF3B1; R625C; 0
VCNTTARAF

SEQ ID NO: 19348 - protein, 8 aa, Homo sapiens
  Table A; HLA-C*08:03; SF3B1; K700E; 0
VDEQQEVR

SEQ ID NO: 19349 - protein, 9 aa, Homo sapiens
  Table A; HLA-B*48:01; SF3B1; K700E; 0
VDEQQEVRT

SEQ ID NO: 19350 - protein, 9 aa, Homo sapiens
  Table A; HLA-C*08:03; SF3B1; K700E; 0
VDEQQEVRT

SEQ ID NO: 19351 - protein, 10 aa, Homo sapiens
  Table A; HLA-B*40:02; SF3B1; K700E; 0
VDEQQEVRTI

SEQ ID NO: 19352 - protein, 10 aa, Homo sapiens
  Table A; HLA-B*44:05; SF3B1; K700E; 0
VDEQQEVRTI

SEQ ID NO: 19353 - protein, 10 aa, Homo sapiens
  Table A; HLA-C*08:03; SF3B1; K700E; 0
VDEQQEVRTI

SEQ ID NO: 19354 - protein, 9 aa, Homo sapiens
  Table A; HLA-B*07:02; SMAD4; R361C; 1
VDPSGGDCF

SEQ ID NO: 19355 - protein, 9 aa, Homo sapiens
  Table A; HLA-B*38:01; SMAD4; R361C; 0
VDPSGGDCF

SEQ ID NO: 19356 - protein, 9 aa, Homo sapiens
  Table A; HLA-B*38:01; SMAD4; R361H; 0
VDPSGGDHF

SEQ ID NO: 19357 - protein, 9 aa, Homo sapiens
  Table A; HLA-B*44:05; SMAD4; R361H; 0
VDPSGGDHF

SEQ ID NO: 19358 - protein, 9 aa, Homo sapiens
  Table A; HLA-B*48:01; SMARCA4; G1232S; 0
VDQKVIQAS

SEQ ID NO: 19359 - protein, 10 aa, Homo sapiens
  Table A; HLA-B*40:02; SMARCA4; G1232S; 0
VDQKVIQASM

SEQ ID NO: 19360 - protein, 10 aa, Homo sapiens
  Table A; HLA-B*44:05; SMARCA4; G1232S; 0
VDQKVIQASM

SEQ ID NO: 19361 - protein, 11 aa, Homo sapiens
  Table A; HLA-A*23:01; TP53; V157F; 0
VDSTPPPGTRF

SEQ ID NO: 19362 - protein, 11 aa, Homo sapiens
  Table A; HLA-B*44:05; TP53; V157F; 0
VDSTPPPGTRF

SEQ ID NO: 19363 - protein, 11 aa, Homo sapiens
  Table A; HLA-B*48:01; TP53; V157F; 0
VDSTPPPGTRF

SEQ ID NO: 19364 - protein, 11 aa, Homo sapiens
  Table A; HLA-B*58:01; TP53; V157F; 0
VDSTPPPGTRF

SEQ ID NO: 19365 - protein, 10 aa, Homo sapiens
  Table A; HLA-A*68:01; TP53; P151S; 0
VDSTSPPGTR

SEQ ID NO: 19366 - protein, 10 aa, Homo sapiens
  Table A; HLA-A*68:02; TP53; P151S; 0
VDSTSPPGTR

SEQ ID NO: 19367 - protein, 10 aa, Homo sapiens
  Table A; HLA-B*27:02; TP53; P151S; 0
VDSTSPPGTR

SEQ ID NO: 19368 - protein, 11 aa, Homo sapiens
  Table A; HLA-A*68:02; TP53; P151S; 0
VDSTSPPGTRV

SEQ ID NO: 19369 - protein, 11 aa, Homo sapiens
  Table A; HLA-B*48:01; TP53; P151S; 0
VDSTSPPGTRV

SEQ ID NO: 19370 - protein, 10 aa, Homo sapiens
  Table A; HLA-A*23:01; TP53; Y205C; 0
VECLDDRNTF

SEQ ID NO: 19371 - protein, 10 aa, Homo sapiens
  Table A; HLA-B*44:03; TP53; Y205C; 0
VECLDDRNTF

SEQ ID NO: 19372 - protein, 10 aa, Homo sapiens
  Table A; HLA-B*44:05; TP53; Y205C; 0
VECLDDRNTF

SEQ ID NO: 19373 - protein, 8 aa, Homo sapiens
  Table A; HLA-B*18:01; FAM135B; S11L; 0
VEFLVELH

SEQ ID NO: 19374 - protein, 10 aa, Homo sapiens
  Table A; HLA-B*44:03; FAM135B; S11L; 0
VEFLVELHKF

SEQ ID NO: 19375 - protein, 9 aa, Homo sapiens
  Table A; HLA-B*40:02; TP53; Y205C; 0
VEGNLRVEC

SEQ ID NO: 19376 - protein, 9 aa, Homo sapiens
  Table A; HLA-B*41:02; TP53; Y205C; 0
VEGNLRVEC

SEQ ID NO: 19377 - protein, 9 aa, Homo sapiens
  Table A; HLA-B*50:01; TP53; Y205C; 0
VEGNLRVEC

SEQ ID NO: 19378 - protein, 10 aa, Homo sapiens
  Table A; HLA-B*40:01; TP53; Y205C; 0
VEGNLRVECL

SEQ ID NO: 19379 - protein, 10 aa, Homo sapiens
  Table A; HLA-B*40:02; TP53; Y205C; 0
VEGNLRVECL

SEQ ID NO: 19380 - protein, 9 aa, Homo sapiens
  Table A; HLA-B*40:02; CNTNAP2; G362E; 0
VENLSFSCV

SEQ ID NO: 19381 - protein, 9 aa, Homo sapiens
  Table A; HLA-B*49:01; CNTNAP2; G362E; 0
VENLSFSCV

SEQ ID NO: 19382 - protein, 9 aa, Homo sapiens
  Table A; HLA-B*50:01; CNTNAP2; G362E; 0
VENLSFSCV

SEQ ID NO: 19383 - protein, 9 aa, Homo sapiens
  Table A; HLA-A*23:01; CNTNAP2; T373M; 0
VEPYMVPVF

SEQ ID NO: 19384 - protein, 9 aa, Homo sapiens
  Table A; HLA-B*18:01; CNTNAP2; T373M; 1
VEPYMVPVF

SEQ ID NO: 19385 - protein, 9 aa, Homo sapiens
  Table A; HLA-B*40:02; CNTNAP2; T373M; 0
VEPYMVPVF

SEQ ID NO: 19386 - protein, 9 aa, Homo sapiens
  Table A; HLA-B*44:05; CNTNAP2; T373M; 0
VEPYMVPVF

SEQ ID NO: 19387 - protein, 10 aa, Homo sapiens
  Table A; HLA-A*23:01; CNTNAP2; T373M; 0
VEPYMVPVFF

SEQ ID NO: 19388 - protein, 9 aa, Homo sapiens
  Table A; HLA-A*23:01; SPOP; M117V; 0
VESQRAYRF

SEQ ID NO: 19389 - protein, 9 aa, Homo sapiens
  Table A; HLA-B*37:01; SPOP; M117V; 0
VESQRAYRF

SEQ ID NO: 19390 - protein, 8 aa, Homo sapiens
  Table A; HLA-A*23:01; CTCF; K365T; 0
VEVSTLKR

SEQ ID NO: 19391 - protein, 8 aa, Homo sapiens
  Table A; HLA-A*23:01; TRRAP; S722F; 0
VFGSVFLF

SEQ ID NO: 19392 - protein, 8 aa, Homo sapiens
  Table A; HLA-A*24:02; TRRAP; S722F; 1
VFGSVFLF

SEQ ID NO: 19393 - protein, 8 aa, Homo sapiens
  Table A; HLA-A*29:02; TRRAP; S722F; 0
VFGSVFLF

SEQ ID NO: 19394 - protein, 8 aa, Homo sapiens
  Table A; HLA-C*14:02; TRRAP; S722F; 0
VFGSVFLF

SEQ ID NO: 19395 - protein, 9 aa, Homo sapiens
  Table A; HLA-A*29:02; TRRAP; S722F; 0
VFGSVFLFA

SEQ ID NO: 19396 - protein, 8 aa, Homo sapiens
  Table A; HLA-A*03:02; KRAS; G12A; 0
VGAAGVGK

SEQ ID NO: 19397 - protein, 9 aa, Homo sapiens
  Table A; HLA-A*02:05; KRAS; G12A; 0
VGAAGVGKS

SEQ ID NO: 19398 - protein, 11 aa, Homo sapiens
  Table A; HLA-B*08:01; KRAS; G12A; 1
VGAAGVGKSAL

SEQ ID NO: 19399 - protein, 11 aa, Homo sapiens
  Table A; HLA-B*08:01; NRAS; G12C; 1
VGACGVGKSAL

SEQ ID NO: 19400 - protein, 8 aa, Homo sapiens
  Table A; HLA-A*03:02; KRAS; G12D; 1
VGADGVGK

SEQ ID NO: 19401 - protein, 8 aa, Homo sapiens
  Table A; HLA-A*03:02; NRAS; G12D; 0
VGADGVGK

SEQ ID NO: 19402 - protein, 8 aa, Homo sapiens
  Table A; HLA-A*11:01; NRAS; G12D; 1
VGADGVGK

SEQ ID NO: 19403 - protein, 9 aa, Homo sapiens
  Table A; HLA-A*02:05; KRAS; G12D; 1
VGADGVGKS

SEQ ID NO: 19404 - protein, 9 aa, Homo sapiens
  Table A; HLA-A*02:05; NRAS; G12D; 0
VGADGVGKS

SEQ ID NO: 19405 - protein, 10 aa, Homo sapiens
  Table A; HLA-A*02:05; KRAS; G12D; 1
VGADGVGKSA

SEQ ID NO: 19406 - protein, 10 aa, Homo sapiens
  Table A; HLA-A*02:05; NRAS; G12D; 0
VGADGVGKSA

SEQ ID NO: 19407 - protein, 10 aa, Homo sapiens
  Table A; HLA-B*39:06; NRAS; G12D; 0
VGADGVGKSA

SEQ ID NO: 19408 - protein, 11 aa, Homo sapiens
  Table A; HLA-B*08:01; KRAS; G12D; 1
VGADGVGKSAL

SEQ ID NO: 19409 - protein, 11 aa, Homo sapiens
  Table A; HLA-B*39:01; KRAS; G12D; 1
VGADGVGKSAL

SEQ ID NO: 19410 - protein, 11 aa, Homo sapiens
  Table A; HLA-C*08:01; KRAS; G12D; 0
VGADGVGKSAL

SEQ ID NO: 19411 - protein, 11 aa, Homo sapiens
  Table A; HLA-B*07:02; NRAS; G12D; 1
VGADGVGKSAL

SEQ ID NO: 19412 - protein, 11 aa, Homo sapiens
  Table A; HLA-B*08:01; NRAS; G12D; 1
VGADGVGKSAL

SEQ ID NO: 19413 - protein, 11 aa, Homo sapiens
  Table A; HLA-B*39:01; NRAS; G12D; 0
VGADGVGKSAL

SEQ ID NO: 19414 - protein, 11 aa, Homo sapiens
  Table A; HLA-C*08:01; NRAS; G12D; 0
VGADGVGKSAL

SEQ ID NO: 19415 - protein, 11 aa, Homo sapiens
  Table A; HLA-C*08:03; NRAS; G12D; 0
VGADGVGKSAL

SEQ ID NO: 19416 - protein, 9 aa, Homo sapiens
  Table A; HLA-A*02:05; KRAS; G13D; 0
VGAGDVGKS

SEQ ID NO: 19417 - protein, 11 aa, Homo sapiens
  Table A; HLA-B*08:01; KRAS; G13D; 1
VGAGDVGKSAL

SEQ ID NO: 19418 - protein, 11 aa, Homo sapiens
  Table A; HLA-B*48:01; KRAS; G13D; 0
VGAGDVGKSAL

SEQ ID NO: 19419 - protein, 11 aa, Homo sapiens
  Table A; HLA-C*08:01; KRAS; G13D; 0
VGAGDVGKSAL

SEQ ID NO: 19420 - protein, 11 aa, Homo sapiens
  Table A; HLA-B*08:01; NRAS; G13R; 1
VGAGRVGKSAL

SEQ ID NO: 19421 - protein, 8 aa, Homo sapiens
  Table A; HLA-A*03:02; KRAS; G12S; 0
VGASGVGK

SEQ ID NO: 19422 - protein, 11 aa, Homo sapiens
  Table A; HLA-B*08:01; KRAS; G12S; 1
VGASGVGKSAL

SEQ ID NO: 19423 - protein, 8 aa, Homo sapiens
  Table A; HLA-A*03:01; KRAS; G12V; 1
VGAVGVGK

SEQ ID NO: 19424 - protein, 8 aa, Homo sapiens
  Table A; HLA-A*03:02; KRAS; G12V; 1
VGAVGVGK

SEQ ID NO: 19425 - protein, 8 aa, Homo sapiens
  Table A; HLA-A*11:01; KRAS; G12V; 1
VGAVGVGK

SEQ ID NO: 19426 - protein, 11 aa, Homo sapiens
  Table A; HLA-B*08:01; KRAS; G12V; 1
VGAVGVGKSAL

SEQ ID NO: 19427 - protein, 9 aa, Homo sapiens
  Table A; HLA-A*31:01; KEAP1; G480W; 0
VGGFDWTNR

SEQ ID NO: 19428 - protein, 8 aa, Homo sapiens
  Table A; HLA-B*58:01; FBXW7; G423V; 0
VGHTGVVW

SEQ ID NO: 19429 - protein, 11 aa, Homo sapiens
  Table A; HLA-A*31:01; PIK3CA; R108H; 0
VGNHEEKILNR

SEQ ID NO: 19430 - protein, 11 aa, Homo sapiens
  Table A; HLA-A*31:01; PIK3CA; K111N; 0
VGNREENILNR

SEQ ID NO: 19431 - protein, 11 aa, Homo sapiens
  Table A; HLA-B*27:02; FBXW7; R689W; 0
VGSWNGTEETK

SEQ ID NO: 19432 - protein, 8 aa, Homo sapiens
  Table A; HLA-B*07:02; KRAS; G12V; 1
VGVGKSAL

SEQ ID NO: 19433 - protein, 8 aa, Homo sapiens
  Table A; HLA-B*08:01; KRAS; G12V; 1
VGVGKSAL

SEQ ID NO: 19434 - protein, 8 aa, Homo sapiens
  Table A; HLA-B*14:02; KRAS; G12V; 1
VGVGKSAL

SEQ ID NO: 19435 - protein, 8 aa, Homo sapiens
  Table A; HLA-B*41:02; KRAS; G12V; 1
VGVGKSAL

SEQ ID NO: 19436 - protein, 8 aa, Homo sapiens
  Table A; HLA-B*48:01; KRAS; G12V; 0
VGVGKSAL

SEQ ID NO: 19437 - protein, 10 aa, Homo sapiens
  Table A; HLA-B*13:02; KRAS; G12V; 1
VGVGKSALTI

SEQ ID NO: 19438 - protein, 9 aa, Homo sapiens
  Table A; HLA-B*15:01; KEAP1; D422N; 0
VGVINGHIY

SEQ ID NO: 19439 - protein, 9 aa, Homo sapiens
  Table A; HLA-B*15:03; KEAP1; D422N; 0
VGVINGHIY

SEQ ID NO: 19440 - protein, 9 aa, Homo sapiens
  Table A; HLA-B*35:01; KEAP1; D422N; 0
VGVINGHIY

SEQ ID NO: 19441 - protein, 9 aa, Homo sapiens
  Table A; HLA-B*46:01; KEAP1; D422N; 0
VGVINGHIY

SEQ ID NO: 19442 - protein, 9 aa, Homo sapiens
  Table A; HLA-B*58:01; KEAP1; D422N; 0
VGVINGHIY

SEQ ID NO: 19443 - protein, 9 aa, Homo sapiens
  Table A; HLA-C*16:01; KEAP1; D422N; 0
VGVINGHIY

SEQ ID NO: 19444 - protein, 9 aa, Homo sapiens
  Table A; HLA-C*16:02; KEAP1; D422N; 0
VGVINGHIY

SEQ ID NO: 19445 - protein, 9 aa, Homo sapiens
  Table A; HLA-C*16:04; KEAP1; D422N; 0
VGVINGHIY

SEQ ID NO: 19446 - protein, 8 aa, Homo sapiens
  Table A; HLA-B*38:01; CDH11; K357T; 0
VHIDPTFI

SEQ ID NO: 19447 - protein, 8 aa, Homo sapiens
  Table A; HLA-B*39:06; CDH11; K357T; 0
VHIDPTFI

SEQ ID NO: 19448 - protein, 8 aa, Homo sapiens
  Table A; HLA-B*39:06; SF3B1; R625H; 0
VHNTTARA

SEQ ID NO: 19449 - protein, 9 aa, Homo sapiens
  Table A; HLA-A*23:01; SF3B1; R625H; 0
VHNTTARAF

SEQ ID NO: 19450 - protein, 9 aa, Homo sapiens
  Table A; HLA-B*15:01; SF3B1; R625H; 1
VHNTTARAF

SEQ ID NO: 19451 - protein, 9 aa, Homo sapiens
  Table A; HLA-B*15:03; SF3B1; R625H; 0
VHNTTARAF

SEQ ID NO: 19452 - protein, 9 aa, Homo sapiens
  Table A; HLA-B*15:10; SF3B1; R625H; 0
VHNTTARAF

SEQ ID NO: 19453 - protein, 9 aa, Homo sapiens
  Table A; HLA-B*38:01; SF3B1; R625H; 0
VHNTTARAF

SEQ ID NO: 19454 - protein, 8 aa, Homo sapiens
  Table A; HLA-B*13:02; PTPRC; Q895H; 0
VHVEAQYI

SEQ ID NO: 19455 - protein, 8 aa, Homo sapiens
  Table A; HLA-B*15:10; PTPRC; Q895H; 0
VHVEAQYI

SEQ ID NO: 19456 - protein, 8 aa, Homo sapiens
  Table A; HLA-B*38:01; PTPRC; Q895H; 0
VHVEAQYI

SEQ ID NO: 19457 - protein, 8 aa, Homo sapiens
  Table A; HLA-B*39:01; PTPRC; Q895H; 0
VHVEAQYI

SEQ ID NO: 19458 - protein, 8 aa, Homo sapiens
  Table A; HLA-B*39:06; PTPRC; Q895H; 0
VHVEAQYI

SEQ ID NO: 19459 - protein, 9 aa, Homo sapiens
  Table A; HLA-B*15:10; PTPRC; Q895H; 0
VHVEAQYIL

SEQ ID NO: 19460 - protein, 9 aa, Homo sapiens
  Table A; HLA-B*38:01; PTPRC; Q895H; 0
VHVEAQYIL

SEQ ID NO: 19461 - protein, 10 aa, Homo sapiens
  Table A; HLA-B*38:01; PTPRC; Q895H; 0
VHVEAQYILI

SEQ ID NO: 19462 - protein, 8 aa, Homo sapiens
  Table A; HLA-B*39:06; CHD4; R975H; 0
VHVELSPM

SEQ ID NO: 19463 - protein, 10 aa, Homo sapiens
  Table A; HLA-B*27:02; CHD4; R975H; 0
VHVELSPMQK

SEQ ID NO: 19464 - protein, 10 aa, Homo sapiens
  Table A; HLA-A*02:01; SIRPA; V233I; 1
VICEVAHITL

SEQ ID NO: 19465 - protein, 10 aa, Homo sapiens
  Table A; HLA-A*02:04; SIRPA; V233I; 0
VICEVAHITL

SEQ ID NO: 19466 - protein, 9 aa, Homo sapiens
  Table A; HLA-C*08:02; CNTNAP2; R283H; 0
VIEHQGRSI

SEQ ID NO: 19467 - protein, 10 aa, Homo sapiens
  Table A; HLA-C*08:03; PIK3CA; R108H; 0
VIEPVGNHEE

SEQ ID NO: 19468 - protein, 8 aa, Homo sapiens
  Table A; HLA-A*33:03; PIK3CA; G106V; 0
VIEPVVNR

SEQ ID NO: 19469 - protein, 8 aa, Homo sapiens
  Table A; HLA-A*68:01; PIK3CA; G106V; 0
VIEPVVNR

SEQ ID NO: 19470 - protein, 8 aa, Homo sapiens
  Table A; HLA-C*08:03; CTNNB1; G34V; 0
VIHSGATT

SEQ ID NO: 19471 - protein, 9 aa, Homo sapiens
  Table A; HLA-A*02:03; CTNNB1; G34V; 0
VIHSGATTT

SEQ ID NO: 19472 - protein, 9 aa, Homo sapiens
  Table A; HLA-A*30:01; CTNNB1; G34V; 0
VIHSGATTT

SEQ ID NO: 19473 - protein, 9 aa, Homo sapiens
  Table A; HLA-B*08:01; CTNNB1; G34V; 1
VIHSGATTT

SEQ ID NO: 19474 - protein, 9 aa, Homo sapiens
  Table A; HLA-B*13:02; CTNNB1; G34V; 0
VIHSGATTT

SEQ ID NO: 19475 - protein, 9 aa, Homo sapiens
  Table A; HLA-B*15:01; CTNNB1; G34V; 1
VIHSGATTT

SEQ ID NO: 19476 - protein, 9 aa, Homo sapiens
  Table A; HLA-B*15:02; CTNNB1; G34V; 0
VIHSGATTT

SEQ ID NO: 19477 - protein, 9 aa, Homo sapiens
  Table A; HLA-B*46:01; CTNNB1; G34V; 0
VIHSGATTT

SEQ ID NO: 19478 - protein, 9 aa, Homo sapiens
  Table A; HLA-B*48:01; CTNNB1; G34V; 0
VIHSGATTT

SEQ ID NO: 19479 - protein, 9 aa, Homo sapiens
  Table A; HLA-C*08:03; CTNNB1; G34V; 0
VIHSGATTT

SEQ ID NO: 19480 - protein, 10 aa, Homo sapiens
  Table A; HLA-A*02:01; CTNNB1; G34V; 1
VIHSGATTTA

SEQ ID NO: 19481 - protein, 10 aa, Homo sapiens
  Table A; HLA-A*02:03; CTNNB1; G34V; 0
VIHSGATTTA

SEQ ID NO: 19482 - protein, 10 aa, Homo sapiens
  Table A; HLA-A*02:05; CTNNB1; G34V; 0
VIHSGATTTA

SEQ ID NO: 19483 - protein, 10 aa, Homo sapiens
  Table A; HLA-A*02:06; CTNNB1; G34V; 0
VIHSGATTTA

SEQ ID NO: 19484 - protein, 10 aa, Homo sapiens
  Table A; HLA-A*02:08; CTNNB1; G34V; 0
VIHSGATTTA

SEQ ID NO: 19485 - protein, 10 aa, Homo sapiens
  Table A; HLA-A*30:01; CTNNB1; G34V; 0
VIHSGATTTA

SEQ ID NO: 19486 - protein, 10 aa, Homo sapiens
  Table A; HLA-B*07:02; CTNNB1; G34V; 1
VIHSGATTTA

SEQ ID NO: 19487 - protein, 10 aa, Homo sapiens
  Table A; HLA-B*13:02; CTNNB1; G34V; 0
VIHSGATTTA

SEQ ID NO: 19488 - protein, 10 aa, Homo sapiens
  Table A; HLA-B*15:01; CTNNB1; G34V; 1
VIHSGATTTA

SEQ ID NO: 19489 - protein, 10 aa, Homo sapiens
  Table A; HLA-B*39:06; CTNNB1; G34V; 0
VIHSGATTTA

SEQ ID NO: 19490 - protein, 10 aa, Homo sapiens
  Table A; HLA-B*46:01; CTNNB1; G34V; 0
VIHSGATTTA

SEQ ID NO: 19491 - protein, 10 aa, Homo sapiens
  Table A; HLA-B*48:01; CTNNB1; G34V; 0
VIHSGATTTA

SEQ ID NO: 19492 - protein, 10 aa, Homo sapiens
  Table A; HLA-B*50:01; CTNNB1; G34V; 0
VIHSGATTTA

SEQ ID NO: 19493 - protein, 10 aa, Homo sapiens
  Table A; HLA-B*54:01; CTNNB1; G34V; 0
VIHSGATTTA

SEQ ID NO: 19494 - protein, 10 aa, Homo sapiens
  Table A; HLA-B*56:01; CTNNB1; G34V; 0
VIHSGATTTA

SEQ ID NO: 19495 - protein, 10 aa, Homo sapiens
  Table A; HLA-C*08:01; CTNNB1; G34V; 0
VIHSGATTTA

SEQ ID NO: 19496 - protein, 10 aa, Homo sapiens
  Table A; HLA-C*08:03; CTNNB1; G34V; 0
VIHSGATTTA

SEQ ID NO: 19497 - protein, 9 aa, Homo sapiens
  Table A; HLA-A*02:01; KEAP1; D422N; 1
VINGHIYAV

SEQ ID NO: 19498 - protein, 9 aa, Homo sapiens
  Table A; HLA-A*02:03; KEAP1; D422N; 0
VINGHIYAV

SEQ ID NO: 19499 - protein, 9 aa, Homo sapiens
  Table A; HLA-A*02:04; KEAP1; D422N; 0
VINGHIYAV

SEQ ID NO: 19500 - protein, 9 aa, Homo sapiens
  Table A; HLA-A*02:05; KEAP1; D422N; 0
VINGHIYAV

SEQ ID NO: 19501 - protein, 9 aa, Homo sapiens
  Table A; HLA-A*02:06; KEAP1; D422N; 0
VINGHIYAV

SEQ ID NO: 19502 - protein, 9 aa, Homo sapiens
  Table A; HLA-A*02:07; KEAP1; D422N; 0
VINGHIYAV

SEQ ID NO: 19503 - protein, 9 aa, Homo sapiens
  Table A; HLA-A*02:08; KEAP1; D422N; 0
VINGHIYAV

SEQ ID NO: 19504 - protein, 9 aa, Homo sapiens
  Table A; HLA-A*03:02; KEAP1; D422N; 0
VINGHIYAV

SEQ ID NO: 19505 - protein, 9 aa, Homo sapiens
  Table A; HLA-A*11:01; KEAP1; D422N; 0
VINGHIYAV

SEQ ID NO: 19506 - protein, 9 aa, Homo sapiens
  Table A; HLA-A*30:01; KEAP1; D422N; 0
VINGHIYAV

SEQ ID NO: 19507 - protein, 9 aa, Homo sapiens
  Table A; HLA-A*31:01; KEAP1; D422N; 0
VINGHIYAV

SEQ ID NO: 19508 - protein, 9 aa, Homo sapiens
  Table A; HLA-A*32:01; KEAP1; D422N; 0
VINGHIYAV

SEQ ID NO: 19509 - protein, 9 aa, Homo sapiens
  Table A; HLA-A*68:02; KEAP1; D422N; 0
VINGHIYAV

SEQ ID NO: 19510 - protein, 9 aa, Homo sapiens
  Table A; HLA-B*08:01; KEAP1; D422N; 1
VINGHIYAV

SEQ ID NO: 19511 - protein, 9 aa, Homo sapiens
  Table A; HLA-B*13:02; KEAP1; D422N; 0
VINGHIYAV

SEQ ID NO: 19512 - protein, 9 aa, Homo sapiens
  Table A; HLA-B*15:01; KEAP1; D422N; 0
VINGHIYAV

SEQ ID NO: 19513 - protein, 9 aa, Homo sapiens
  Table A; HLA-B*15:02; KEAP1; D422N; 0
VINGHIYAV

SEQ ID NO: 19514 - protein, 9 aa, Homo sapiens
  Table A; HLA-B*35:03; KEAP1; D422N; 0
VINGHIYAV

SEQ ID NO: 19515 - protein, 9 aa, Homo sapiens
  Table A; HLA-B*40:02; KEAP1; D422N; 0
VINGHIYAV

SEQ ID NO: 19516 - protein, 9 aa, Homo sapiens
  Table A; HLA-B*46:01; KEAP1; D422N; 0
VINGHIYAV

SEQ ID NO: 19517 - protein, 9 aa, Homo sapiens
  Table A; HLA-B*48:01; KEAP1; D422N; 0
VINGHIYAV

SEQ ID NO: 19518 - protein, 9 aa, Homo sapiens
  Table A; HLA-B*50:01; KEAP1; D422N; 0
VINGHIYAV

SEQ ID NO: 19519 - protein, 9 aa, Homo sapiens
  Table A; HLA-B*54:01; KEAP1; D422N; 0
VINGHIYAV

SEQ ID NO: 19520 - protein, 9 aa, Homo sapiens
  Table A; HLA-B*58:01; KEAP1; D422N; 0
VINGHIYAV

SEQ ID NO: 19521 - protein, 9 aa, Homo sapiens
  Table A; HLA-C*02:02; KEAP1; D422N; 0
VINGHIYAV

SEQ ID NO: 19522 - protein, 9 aa, Homo sapiens
  Table A; HLA-C*03:02; KEAP1; D422N; 0
VINGHIYAV

SEQ ID NO: 19523 - protein, 9 aa, Homo sapiens
  Table A; HLA-C*08:01; KEAP1; D422N; 0
VINGHIYAV

SEQ ID NO: 19524 - protein, 9 aa, Homo sapiens
  Table A; HLA-C*12:03; KEAP1; D422N; 0
VINGHIYAV

SEQ ID NO: 19525 - protein, 9 aa, Homo sapiens
  Table A; HLA-C*15:02; KEAP1; D422N; 0
VINGHIYAV

SEQ ID NO: 19526 - protein, 9 aa, Homo sapiens
  Table A; HLA-C*16:01; KEAP1; D422N; 0
VINGHIYAV

SEQ ID NO: 19527 - protein, 9 aa, Homo sapiens
  Table A; HLA-C*16:02; KEAP1; D422N; 0
VINGHIYAV

SEQ ID NO: 19528 - protein, 9 aa, Homo sapiens
  Table A; HLA-C*16:04; KEAP1; D422N; 0
VINGHIYAV

SEQ ID NO: 19529 - protein, 10 aa, Homo sapiens
  Table A; HLA-A*03:02; SMARCA4; G1232S; 0
VIQASMFDQK

SEQ ID NO: 19530 - protein, 10 aa, Homo sapiens
  Table A; HLA-A*11:01; SMARCA4; G1232S; 0
VIQASMFDQK

SEQ ID NO: 19531 - protein, 10 aa, Homo sapiens
  Table A; HLA-B*27:02; SMARCA4; G1232S; 0
VIQASMFDQK

SEQ ID NO: 19532 - protein, 9 aa, Homo sapiens
  Table A; HLA-A*02:01; CTNND1; A781T; 1
VITENLEAA

SEQ ID NO: 19533 - protein, 9 aa, Homo sapiens
  Table A; HLA-A*02:03; CTNND1; A781T; 0
VITENLEAA

SEQ ID NO: 19534 - protein, 9 aa, Homo sapiens
  Table A; HLA-A*02:05; CTNND1; A781T; 0
VITENLEAA

SEQ ID NO: 19535 - protein, 9 aa, Homo sapiens
  Table A; HLA-A*02:06; CTNND1; A781T; 0
VITENLEAA

SEQ ID NO: 19536 - protein, 9 aa, Homo sapiens
  Table A; HLA-A*02:08; CTNND1; A781T; 0
VITENLEAA

SEQ ID NO: 19537 - protein, 9 aa, Homo sapiens
  Table A; HLA-B*39:06; CTNND1; A781T; 0
VITENLEAA

SEQ ID NO: 19538 - protein, 9 aa, Homo sapiens
  Table A; HLA-B*50:01; CTNND1; A781T; 0
VITENLEAA

SEQ ID NO: 19539 - protein, 9 aa, Homo sapiens
  Table A; HLA-B*54:01; CTNND1; A781T; 0
VITENLEAA

SEQ ID NO: 19540 - protein, 9 aa, Homo sapiens
  Table A; HLA-B*55:02; CTNND1; A781T; 0
VITENLEAA

SEQ ID NO: 19541 - protein, 9 aa, Homo sapiens
  Table A; HLA-B*56:01; CTNND1; A781T; 0
VITENLEAA

SEQ ID NO: 19542 - protein, 9 aa, Homo sapiens
  Table A; HLA-C*08:01; CTNND1; A781T; 0
VITENLEAA

SEQ ID NO: 19543 - protein, 10 aa, Homo sapiens
  Table A; HLA-A*03:02; CTNND1; A781T; 0
VITENLEAAK

SEQ ID NO: 19544 - protein, 10 aa, Homo sapiens
  Table A; HLA-A*11:01; CTNND1; A781T; 0
VITENLEAAK

SEQ ID NO: 19545 - protein, 10 aa, Homo sapiens
  Table A; HLA-A*68:01; CTNND1; A781T; 0
VITENLEAAK

SEQ ID NO: 19546 - protein, 10 aa, Homo sapiens
  Table A; HLA-B*27:02; CTNND1; A781T; 0
VITENLEAAK

SEQ ID NO: 19547 - protein, 11 aa, Homo sapiens
  Table A; HLA-A*03:02; CTNND1; A781T; 0
VITENLEAAKK

SEQ ID NO: 19548 - protein, 11 aa, Homo sapiens
  Table A; HLA-A*11:01; CTNND1; A781T; 0
VITENLEAAKK

SEQ ID NO: 19549 - protein, 11 aa, Homo sapiens
  Table A; HLA-A*68:01; CTNND1; A781T; 0
VITENLEAAKK

SEQ ID NO: 19550 - protein, 11 aa, Homo sapiens
  Table A; HLA-B*27:02; CTNND1; A781T; 0
VITENLEAAKK

SEQ ID NO: 19551 - protein, 11 aa, Homo sapiens
  Table A; HLA-B*57:01; PIK3CA; E542V; 0
VITEQEKDFLW

SEQ ID NO: 19552 - protein, 11 aa, Homo sapiens
  Table A; HLA-B*15:03; IDH1; R132G; 0
VKPIIIGGHAY

SEQ ID NO: 19553 - protein, 8 aa, Homo sapiens
  Table A; HLA-B*48:01; IDH1; R132L; 0
VKPIIIGL

SEQ ID NO: 19554 - protein, 9 aa, Homo sapiens
  Table A; HLA-B*48:01; IDH1; R132S; 0
VKPIIIGSH

SEQ ID NO: 19555 - protein, 9 aa, Homo sapiens
  Table A; HLA-B*15:03; RAC1; A159V; 0
VKYLECSVL

SEQ ID NO: 19556 - protein, 9 aa, Homo sapiens
  Table A; HLA-B*48:01; RAC1; A159V; 0
VKYLECSVL

SEQ ID NO: 19557 - protein, 9 aa, Homo sapiens
  Table A; HLA-A*30:02; MAP2K1; P124S; 0
VLHECNSSY

SEQ ID NO: 19558 - protein, 9 aa, Homo sapiens
  Table A; HLA-B*15:01; MAP2K1; P124S; 1
VLHECNSSY

SEQ ID NO: 19559 - protein, 9 aa, Homo sapiens
  Table A; HLA-B*15:02; MAP2K1; P124S; 0
VLHECNSSY

SEQ ID NO: 19560 - protein, 9 aa, Homo sapiens
  Table A; HLA-B*15:03; MAP2K1; P124S; 0
VLHECNSSY

SEQ ID NO: 19561 - protein, 9 aa, Homo sapiens
  Table A; HLA-B*46:01; MAP2K1; P124S; 0
VLHECNSSY

SEQ ID NO: 19562 - protein, 9 aa, Homo sapiens
  Table A; HLA-C*08:01; MAP2K1; P124S; 0
VLHECNSSY

SEQ ID NO: 19563 - protein, 9 aa, Homo sapiens
  Table A; HLA-A*02:04; KDR; S1100F; 0
VLLWEIFFL

SEQ ID NO: 19564 - protein, 9 aa, Homo sapiens
  Table A; HLA-A*02:07; KDR; S1100F; 0
VLLWEIFFL

SEQ ID NO: 19565 - protein, 9 aa, Homo sapiens
  Table A; HLA-A*02:01; KEAP1; R470C; 1
VLNCLLYAV

SEQ ID NO: 19566 - protein, 9 aa, Homo sapiens
  Table A; HLA-A*02:04; KEAP1; R470C; 0
VLNCLLYAV

SEQ ID NO: 19567 - protein, 9 aa, Homo sapiens
  Table A; HLA-A*02:03; CREBBP; P2094L; 0
VLNILKSNL

SEQ ID NO: 19568 - protein, 9 aa, Homo sapiens
  Table A; HLA-A*02:04; CREBBP; P2094L; 0
VLNILKSNL

SEQ ID NO: 19569 - protein, 11 aa, Homo sapiens
  Table A; HLA-A*02:04; CRNKL1; S128F; 0
VLQVPLPVPRF

SEQ ID NO: 19570 - protein, 8 aa, Homo sapiens
  Table A; HLA-A*03:01; RAC1; A159V; 1
VLTQRGLK

SEQ ID NO: 19571 - protein, 8 aa, Homo sapiens
  Table A; HLA-A*03:02; RAC1; A159V; 0
VLTQRGLK

SEQ ID NO: 19572 - protein, 8 aa, Homo sapiens
  Table A; HLA-A*11:01; RAC1; A159V; 0
VLTQRGLK

SEQ ID NO: 19573 - protein, 9 aa, Homo sapiens
  Table A; HLA-A*02:03; RAC1; A159V; 0
VLTQRGLKT

SEQ ID NO: 19574 - protein, 10 aa, Homo sapiens
  Table A; HLA-A*02:01; RAC1; A159V; 1
VLTQRGLKTV

SEQ ID NO: 19575 - protein, 10 aa, Homo sapiens
  Table A; HLA-A*02:03; RAC1; A159V; 0
VLTQRGLKTV

SEQ ID NO: 19576 - protein, 10 aa, Homo sapiens
  Table A; HLA-A*02:01; MTOR; A2056V; 1
VMMERGPQTL

SEQ ID NO: 19577 - protein, 10 aa, Homo sapiens
  Table A; HLA-A*02:03; MTOR; A2056V; 0
VMMERGPQTL

SEQ ID NO: 19578 - protein, 10 aa, Homo sapiens
  Table A; HLA-A*02:04; MTOR; A2056V; 0
VMMERGPQTL

SEQ ID NO: 19579 - protein, 10 aa, Homo sapiens
  Table A; HLA-A*24:02; MTOR; A2056V; 1
VMMERGPQTL

SEQ ID NO: 19580 - protein, 10 aa, Homo sapiens
  Table A; HLA-B*08:01; MTOR; A2056V; 1
VMMERGPQTL

SEQ ID NO: 19581 - protein, 10 aa, Homo sapiens
  Table A; HLA-B*48:01; MTOR; A2056V; 0
VMMERGPQTL

SEQ ID NO: 19582 - protein, 11 aa, Homo sapiens
  Table A; HLA-A*03:01; MTOR; A2056V; 1
VMMERGPQTLK

SEQ ID NO: 19583 - protein, 11 aa, Homo sapiens
  Table A; HLA-A*03:02; MTOR; A2056V; 0
VMMERGPQTLK

SEQ ID NO: 19584 - protein, 8 aa, Homo sapiens
  Table A; HLA-B*08:01; MTOR; E1799K; 1
VMNFKAVL

SEQ ID NO: 19585 - protein, 9 aa, Homo sapiens
  Table A; HLA-A*03:01; MTOR; E1799K; 1
VMNFKAVLH

SEQ ID NO: 19586 - protein, 9 aa, Homo sapiens
  Table A; HLA-A*03:02; MTOR; E1799K; 0
VMNFKAVLH

SEQ ID NO: 19587 - protein, 10 aa, Homo sapiens
  Table A; HLA-A*29:02; MTOR; E1799K; 1
VMNFKAVLHY

SEQ ID NO: 19588 - protein, 8 aa, Homo sapiens
  Table A; HLA-B*15:01; RGPD3; N756D; 1
VMQELEDY

SEQ ID NO: 19589 - protein, 8 aa, Homo sapiens
  Table A; HLA-B*46:01; RGPD3; N756D; 0
VMQELEDY

SEQ ID NO: 19590 - protein, 8 aa, Homo sapiens
  Table A; HLA-B*57:01; ROBO2; D1014N; 0
VNLPDPQW

SEQ ID NO: 19591 - protein, 8 aa, Homo sapiens
  Table A; HLA-A*31:01; PIK3CA; C378R; 0
VNTQRVPR

SEQ ID NO: 19592 - protein, 8 aa, Homo sapiens
  Table A; HLA-A*33:01; PIK3CA; C378R; 0
VNTQRVPR

SEQ ID NO: 19593 - protein, 8 aa, Homo sapiens
  Table A; HLA-A*33:03; PIK3CA; C378R; 0
VNTQRVPR

SEQ ID NO: 19594 - protein, 8 aa, Homo sapiens
  Table A; HLA-B*51:01; TP53; Y220C; 1
VPCEPPEV

SEQ ID NO: 19595 - protein, 8 aa, Homo sapiens
  Table A; HLA-B*54:01; TP53; Y220C; 0
VPCEPPEV

SEQ ID NO: 19596 - protein, 9 aa, Homo sapiens
  Table A; HLA-B*35:03; PIK3CA; E453Q; 0
VPHGLQDLL

SEQ ID NO: 19597 - protein, 8 aa, Homo sapiens
  Table A; HLA-A*23:01; CRNKL1; S128F; 0
VPLPVPRF

SEQ ID NO: 19598 - protein, 8 aa, Homo sapiens
  Table A; HLA-B*51:01; CRNKL1; S128F; 1
VPLPVPRF

SEQ ID NO: 19599 - protein, 8 aa, Homo sapiens
  Table A; HLA-B*54:01; CRNKL1; S128F; 0
VPLPVPRF

SEQ ID NO: 19600 - protein, 8 aa, Homo sapiens
  Table A; HLA-B*55:01; CRNKL1; S128F; 0
VPLPVPRF

SEQ ID NO: 19601 - protein, 8 aa, Homo sapiens
  Table A; HLA-B*07:02; ACSL3; R232Q; 1
VPRLQHII

SEQ ID NO: 19602 - protein, 8 aa, Homo sapiens
  Table A; HLA-B*51:01; ACSL3; R232Q; 1
VPRLQHII

SEQ ID NO: 19603 - protein, 8 aa, Homo sapiens
  Table A; HLA-B*54:01; ACSL3; R232Q; 0
VPRLQHII

SEQ ID NO: 19604 - protein, 10 aa, Homo sapiens
  Table A; HLA-B*07:02; ACSL3; R232Q; 1
VPRLQHIITV

SEQ ID NO: 19605 - protein, 10 aa, Homo sapiens
  Table A; HLA-B*51:01; ACSL3; R232Q; 1
VPRLQHIITV

SEQ ID NO: 19606 - protein, 10 aa, Homo sapiens
  Table A; HLA-B*54:01; ACSL3; R232Q; 0
VPRLQHIITV

SEQ ID NO: 19607 - protein, 10 aa, Homo sapiens
  Table A; HLA-B*55:01; ACSL3; R232Q; 0
VPRLQHIITV

SEQ ID NO: 19608 - protein, 10 aa, Homo sapiens
  Table A; HLA-B*55:02; ACSL3; R232Q; 0
VPRLQHIITV

SEQ ID NO: 19609 - protein, 10 aa, Homo sapiens
  Table A; HLA-B*56:01; ACSL3; R232Q; 0
VPRLQHIITV

SEQ ID NO: 19610 - protein, 8 aa, Homo sapiens
  Table A; HLA-B*54:01; RHOA; Y42C; 0
VPTVFENC

SEQ ID NO: 19611 - protein, 8 aa, Homo sapiens
  Table A; HLA-B*55:02; RHOA; Y42C; 0
VPTVFENC

SEQ ID NO: 19612 - protein, 8 aa, Homo sapiens
  Table A; HLA-B*56:01; RHOA; Y42C; 0
VPTVFENC

SEQ ID NO: 19613 - protein, 9 aa, Homo sapiens
  Table A; HLA-A*68:02; RHOA; Y42C; 0
VPTVFENCV

SEQ ID NO: 19614 - protein, 9 aa, Homo sapiens
  Table A; HLA-B*07:02; RHOA; Y42C; 1
VPTVFENCV

SEQ ID NO: 19615 - protein, 9 aa, Homo sapiens
  Table A; HLA-B*35:03; RHOA; Y42C; 0
VPTVFENCV

SEQ ID NO: 19616 - protein, 9 aa, Homo sapiens
  Table A; HLA-B*39:06; RHOA; Y42C; 0
VPTVFENCV

SEQ ID NO: 19617 - protein, 9 aa, Homo sapiens
  Table A; HLA-B*51:01; RHOA; Y42C; 0
VPTVFENCV

SEQ ID NO: 19618 - protein, 9 aa, Homo sapiens
  Table A; HLA-B*54:01; RHOA; Y42C; 0
VPTVFENCV

SEQ ID NO: 19619 - protein, 9 aa, Homo sapiens
  Table A; HLA-B*55:01; RHOA; Y42C; 0
VPTVFENCV

SEQ ID NO: 19620 - protein, 9 aa, Homo sapiens
  Table A; HLA-B*55:02; RHOA; Y42C; 0
VPTVFENCV

SEQ ID NO: 19621 - protein, 9 aa, Homo sapiens
  Table A; HLA-B*56:01; RHOA; Y42C; 0
VPTVFENCV

SEQ ID NO: 19622 - protein, 10 aa, Homo sapiens
  Table A; HLA-B*54:01; RHOA; Y42C; 0
VPTVFENCVA

SEQ ID NO: 19623 - protein, 10 aa, Homo sapiens
  Table A; HLA-B*55:02; RHOA; Y42C; 0
VPTVFENCVA

SEQ ID NO: 19624 - protein, 10 aa, Homo sapiens
  Table A; HLA-B*56:01; RHOA; Y42C; 0
VPTVFENCVA

SEQ ID NO: 19625 - protein, 8 aa, Homo sapiens
  Table A; HLA-B*13:02; SPOP; F133V; 0
VQGKDWGV

SEQ ID NO: 19626 - protein, 9 aa, Homo sapiens
  Table A; HLA-A*30:04; A1CF; E34K; 0
VQKNGQRKY

SEQ ID NO: 19627 - protein, 9 aa, Homo sapiens
  Table A; HLA-B*15:01; A1CF; E34K; 1
VQKNGQRKY

SEQ ID NO: 19628 - protein, 9 aa, Homo sapiens
  Table A; HLA-B*15:03; A1CF; E34K; 0
VQKNGQRKY

SEQ ID NO: 19629 - protein, 9 aa, Homo sapiens
  Table A; HLA-C*02:02; A1CF; E34K; 1
VQKNGQRKY

SEQ ID NO: 19630 - protein, 8 aa, Homo sapiens
  Table A; HLA-B*13:02; PPP2R1A; R28C; 0
VQLCLNSI

SEQ ID NO: 19631 - protein, 11 aa, Homo sapiens
  Table A; HLA-A*03:01; A1CF; E34K; 1
VQRTGYSLVQK

SEQ ID NO: 19632 - protein, 11 aa, Homo sapiens
  Table A; HLA-A*11:01; A1CF; E34K; 1
VQRTGYSLVQK

SEQ ID NO: 19633 - protein, 11 aa, Homo sapiens
  Table A; HLA-A*31:01; A1CF; E34K; 0
VQRTGYSLVQK

SEQ ID NO: 19634 - protein, 9 aa, Homo sapiens
  Table A; HLA-B*13:02; ACVR1; R206H; 0
VQRTVAHQI

SEQ ID NO: 19635 - protein, 8 aa, Homo sapiens
  Table A; HLA-B*13:02; ARHGEF12; R113Q; 0
VQTGDQII

SEQ ID NO: 19636 - protein, 8 aa, Homo sapiens
  Table A; HLA-B*48:01; ARHGEF12; R113Q; 0
VQTGDQII

SEQ ID NO: 19637 - protein, 9 aa, Homo sapiens
  Table A; HLA-A*11:01; ARHGEF12; R113Q; 0
VQTGDQIIK

SEQ ID NO: 19638 - protein, 10 aa, Homo sapiens
  Table A; HLA-A*02:04; ARHGEF12; R113Q; 0
VQTGDQIIKV

SEQ ID NO: 19639 - protein, 10 aa, Homo sapiens
  Table A; HLA-A*02:05; ARHGEF12; R113Q; 0
VQTGDQIIKV

SEQ ID NO: 19640 - protein, 10 aa, Homo sapiens
  Table A; HLA-A*02:06; ARHGEF12; R113Q; 0
VQTGDQIIKV

SEQ ID NO: 19641 - protein, 10 aa, Homo sapiens
  Table A; HLA-B*13:02; ARHGEF12; R113Q; 0
VQTGDQIIKV

SEQ ID NO: 19642 - protein, 9 aa, Homo sapiens
  Table A; HLA-A*02:01; CNTNAP2; R483Q; 1
VQTNSPLQV

SEQ ID NO: 19643 - protein, 9 aa, Homo sapiens
  Table A; HLA-A*02:03; CNTNAP2; R483Q; 0
VQTNSPLQV

SEQ ID NO: 19644 - protein, 9 aa, Homo sapiens
  Table A; HLA-A*02:04; CNTNAP2; R483Q; 0
VQTNSPLQV

SEQ ID NO: 19645 - protein, 9 aa, Homo sapiens
  Table A; HLA-A*02:05; CNTNAP2; R483Q; 0
VQTNSPLQV

SEQ ID NO: 19646 - protein, 9 aa, Homo sapiens
  Table A; HLA-A*02:06; CNTNAP2; R483Q; 0
VQTNSPLQV

SEQ ID NO: 19647 - protein, 9 aa, Homo sapiens
  Table A; HLA-A*02:08; CNTNAP2; R483Q; 0
VQTNSPLQV

SEQ ID NO: 19648 - protein, 9 aa, Homo sapiens
  Table A; HLA-B*13:02; CNTNAP2; R483Q; 0
VQTNSPLQV

SEQ ID NO: 19649 - protein, 9 aa, Homo sapiens
  Table A; HLA-C*15:02; CNTNAP2; R483Q; 0
VQTNSPLQV

SEQ ID NO: 19650 - protein, 10 aa, Homo sapiens
  Table A; HLA-A*03:01; CNTNAP2; R483Q; 1
VQTNSPLQVK

SEQ ID NO: 19651 - protein, 10 aa, Homo sapiens
  Table A; HLA-A*03:02; CNTNAP2; R483Q; 0
VQTNSPLQVK

SEQ ID NO: 19652 - protein, 10 aa, Homo sapiens
  Table A; HLA-A*11:01; CNTNAP2; R483Q; 1
VQTNSPLQVK

SEQ ID NO: 19653 - protein, 10 aa, Homo sapiens
  Table A; HLA-B*27:02; CNTNAP2; R483Q; 0
VQTNSPLQVK

SEQ ID NO: 19654 - protein, 9 aa, Homo sapiens
  Table A; HLA-C*06:02; CDKN2A; P114L; 1
VRDAWGRLL

SEQ ID NO: 19655 - protein, 10 aa, Homo sapiens
  Table A; HLA-B*27:02; PTK6; H126P; 0
VRDTQAVRPY

SEQ ID NO: 19656 - protein, 8 aa, Homo sapiens
  Table A; HLA-B*15:01; HIST1H3B; E74K; 0
VRKIAQDF

SEQ ID NO: 19657 - protein, 8 aa, Homo sapiens
  Table A; HLA-B*15:03; HIST1H3B; E74K; 0
VRKIAQDF

SEQ ID NO: 19658 - protein, 9 aa, Homo sapiens
  Table A; HLA-A*68:02; TP53; G266V; 0
VRNSFEVRV

SEQ ID NO: 19659 - protein, 9 aa, Homo sapiens
  Table A; HLA-B*27:05; TP53; G266V; 0
VRNSFEVRV

SEQ ID NO: 19660 - protein, 9 aa, Homo sapiens
  Table A; HLA-C*06:02; TP53; G266V; 1
VRNSFEVRV

SEQ ID NO: 19661 - protein, 9 aa, Homo sapiens
  Table A; HLA-B*27:05; PPP2R1A; R183W; 0
VRWAAASKL

SEQ ID NO: 19662 - protein, 9 aa, Homo sapiens
  Table A; HLA-C*06:02; PPP2R1A; R183W; 1
VRWAAASKL

SEQ ID NO: 19663 - protein, 8 aa, Homo sapiens
  Table A; HLA-A*11:01; BRAF; G466V; 1
VSFGTVYK

SEQ ID NO: 19664 - protein, 11 aa, Homo sapiens
  Table A; HLA-B*57:01; BRAF; G466V; 0
VSFGTVYKGKW

SEQ ID NO: 19665 - protein, 8 aa, Homo sapiens
  Table A; HLA-B*57:01; NFE2L2; R34G; 0
VSGEVFDF

SEQ ID NO: 19666 - protein, 8 aa, Homo sapiens
  Table A; HLA-B*58:01; NFE2L2; R34G; 0
VSGEVFDF

SEQ ID NO: 19667 - protein, 11 aa, Homo sapiens
  Table A; HLA-A*31:01; NFE2L2; R34G; 0
VSGEVFDFSQR

SEQ ID NO: 19668 - protein, 8 aa, Homo sapiens
  Table A; HLA-B*48:01; CTNNB1; D32V; 0
VSGIHSGA

SEQ ID NO: 19669 - protein, 8 aa, Homo sapiens
  Table A; HLA-C*08:03; CTNNB1; D32V; 0
VSGIHSGA

SEQ ID NO: 19670 - protein, 9 aa, Homo sapiens
  Table A; HLA-B*08:01; CTNNB1; D32V; 1
VSGIHSGAT

SEQ ID NO: 19671 - protein, 9 aa, Homo sapiens
  Table A; HLA-B*48:01; CTNNB1; D32V; 0
VSGIHSGAT

SEQ ID NO: 19672 - protein, 9 aa, Homo sapiens
  Table A; HLA-C*08:03; CTNNB1; D32V; 0
VSGIHSGAT

SEQ ID NO: 19673 - protein, 9 aa, Homo sapiens
  Table A; HLA-A*02:04; AR; F814V; 0
VSIIPVDGL

SEQ ID NO: 19674 - protein, 9 aa, Homo sapiens
  Table A; HLA-A*02:05; AR; F814V; 0
VSIIPVDGL

SEQ ID NO: 19675 - protein, 9 aa, Homo sapiens
  Table A; HLA-A*02:06; AR; F814V; 0
VSIIPVDGL

SEQ ID NO: 19676 - protein, 9 aa, Homo sapiens
  Table A; HLA-A*02:08; AR; F814V; 0
VSIIPVDGL

SEQ ID NO: 19677 - protein, 9 aa, Homo sapiens
  Table A; HLA-A*30:01; AR; F814V; 0
VSIIPVDGL

SEQ ID NO: 19678 - protein, 9 aa, Homo sapiens
  Table A; HLA-B*15:01; AR; F814V; 1
VSIIPVDGL

SEQ ID NO: 19679 - protein, 9 aa, Homo sapiens
  Table A; HLA-B*15:02; AR; F814V; 0
VSIIPVDGL

SEQ ID NO: 19680 - protein, 9 aa, Homo sapiens
  Table A; HLA-B*40:01; AR; F814V; 1
VSIIPVDGL

SEQ ID NO: 19681 - protein, 9 aa, Homo sapiens
  Table A; HLA-B*40:02; AR; F814V; 0
VSIIPVDGL

SEQ ID NO: 19682 - protein, 9 aa, Homo sapiens
  Table A; HLA-B*44:05; AR; F814V; 0
VSIIPVDGL

SEQ ID NO: 19683 - protein, 9 aa, Homo sapiens
  Table A; HLA-B*46:01; AR; F814V; 0
VSIIPVDGL

SEQ ID NO: 19684 - protein, 9 aa, Homo sapiens
  Table A; HLA-B*48:01; AR; F814V; 0
VSIIPVDGL

SEQ ID NO: 19685 - protein, 9 aa, Homo sapiens
  Table A; HLA-B*57:01; AR; F814V; 0
VSIIPVDGL

SEQ ID NO: 19686 - protein, 9 aa, Homo sapiens
  Table A; HLA-B*58:01; AR; F814V; 0
VSIIPVDGL

SEQ ID NO: 19687 - protein, 9 aa, Homo sapiens
  Table A; HLA-C*03:03; AR; F814V; 1
VSIIPVDGL

SEQ ID NO: 19688 - protein, 9 aa, Homo sapiens
  Table A; HLA-C*03:04; AR; F814V; 1
VSIIPVDGL

SEQ ID NO: 19689 - protein, 9 aa, Homo sapiens
  Table A; HLA-C*08:01; AR; F814V; 0
VSIIPVDGL

SEQ ID NO: 19690 - protein, 9 aa, Homo sapiens
  Table A; HLA-C*08:03; AR; F814V; 0
VSIIPVDGL

SEQ ID NO: 19691 - protein, 9 aa, Homo sapiens
  Table A; HLA-C*15:02; AR; F814V; 0
VSIIPVDGL

SEQ ID NO: 19692 - protein, 9 aa, Homo sapiens
  Table A; HLA-C*17:01; AR; F814V; 0
VSIIPVDGL

SEQ ID NO: 19693 - protein, 10 aa, Homo sapiens
  Table A; HLA-A*11:01; AR; F814V; 1
VSIIPVDGLK

SEQ ID NO: 19694 - protein, 9 aa, Homo sapiens
  Table A; HLA-B*15:01; BCOR; N1425S; 1
VSKNAGETL

SEQ ID NO: 19695 - protein, 9 aa, Homo sapiens
  Table A; HLA-B*46:01; BCOR; N1425S; 0
VSKNAGETL

SEQ ID NO: 19696 - protein, 9 aa, Homo sapiens
  Table A; HLA-B*58:01; BCOR; N1425S; 0
VSKNAGETL

SEQ ID NO: 19697 - protein, 9 aa, Homo sapiens
  Table A; HLA-C*03:03; BCOR; N1425S; 1
VSKNAGETL

SEQ ID NO: 19698 - protein, 9 aa, Homo sapiens
  Table A; HLA-C*03:04; BCOR; N1425S; 1
VSKNAGETL

SEQ ID NO: 19699 - protein, 9 aa, Homo sapiens
  Table A; HLA-C*08:01; BCOR; N1425S; 0
VSKNAGETL

SEQ ID NO: 19700 - protein, 11 aa, Homo sapiens
  Table A; HLA-A*31:01; NFE2L2; R34Q; 0
VSQEVFDFSQR

SEQ ID NO: 19701 - protein, 11 aa, Homo sapiens
  Table A; HLA-A*68:01; NFE2L2; R34Q; 0
VSQEVFDFSQR

SEQ ID NO: 19702 - protein, 10 aa, Homo sapiens
  Table A; HLA-B*57:01; DCC; R446H; 0
VSSRFVHLSW

SEQ ID NO: 19703 - protein, 8 aa, Homo sapiens
  Table A; HLA-C*16:02; CHST11; A159T; 0
VSTNLKTL

SEQ ID NO: 19704 - protein, 11 aa, Homo sapiens
  Table A; HLA-A*30:02; CHST11; A159T; 0
VSTNLKTLNQY

SEQ ID NO: 19705 - protein, 9 aa, Homo sapiens
  Table A; HLA-C*03:03; TP53; S127F; 0
VTCTYFPAL

SEQ ID NO: 19706 - protein, 9 aa, Homo sapiens
  Table A; HLA-C*03:04; TP53; S127F; 1
VTCTYFPAL

SEQ ID NO: 19707 - protein, 9 aa, Homo sapiens
  Table A; HLA-B*58:01; TP53; L130F; 0
VTCTYSPAF

SEQ ID NO: 19708 - protein, 11 aa, Homo sapiens
  Table A; HLA-A*33:03; TP53; K132R; 0
VTCTYSPALNR

SEQ ID NO: 19709 - protein, 9 aa, Homo sapiens
  Table A; HLA-A*29:02; PTEN; S170N; 0
VTIPNQRRY

SEQ ID NO: 19710 - protein, 9 aa, Homo sapiens
  Table A; HLA-A*30:04; PTEN; S170N; 0
VTIPNQRRY

SEQ ID NO: 19711 - protein, 9 aa, Homo sapiens
  Table A; HLA-B*15:01; PTEN; S170N; 0
VTIPNQRRY

SEQ ID NO: 19712 - protein, 9 aa, Homo sapiens
  Table A; HLA-B*57:01; PTEN; S170N; 0
VTIPNQRRY

SEQ ID NO: 19713 - protein, 9 aa, Homo sapiens
  Table A; HLA-B*58:01; PTEN; S170N; 0
VTIPNQRRY

SEQ ID NO: 19714 - protein, 9 aa, Homo sapiens
  Table A; HLA-C*16:01; PTEN; S170N; 0
VTIPNQRRY

SEQ ID NO: 19715 - protein, 9 aa, Homo sapiens
  Table A; HLA-A*30:02; PTEN; R173C; 0
VTIPSQRCY

SEQ ID NO: 19716 - protein, 9 aa, Homo sapiens
  Table A; HLA-A*30:04; PTEN; R173C; 0
VTIPSQRCY

SEQ ID NO: 19717 - protein, 9 aa, Homo sapiens
  Table A; HLA-A*32:01; PTEN; R173C; 0
VTIPSQRCY

SEQ ID NO: 19718 - protein, 9 aa, Homo sapiens
  Table A; HLA-B*15:01; PTEN; R173C; 1
VTIPSQRCY

SEQ ID NO: 19719 - protein, 9 aa, Homo sapiens
  Table A; HLA-B*57:01; PTEN; R173C; 0
VTIPSQRCY

SEQ ID NO: 19720 - protein, 9 aa, Homo sapiens
  Table A; HLA-B*58:01; PTEN; R173C; 0
VTIPSQRCY

SEQ ID NO: 19721 - protein, 9 aa, Homo sapiens
  Table A; HLA-C*02:02; PTEN; R173C; 0
VTIPSQRCY

SEQ ID NO: 19722 - protein, 9 aa, Homo sapiens
  Table A; HLA-C*12:03; PTEN; R173C; 1
VTIPSQRCY

SEQ ID NO: 19723 - protein, 9 aa, Homo sapiens
  Table A; HLA-C*16:01; PTEN; R173C; 0
VTIPSQRCY

SEQ ID NO: 19724 - protein, 9 aa, Homo sapiens
  Table A; HLA-A*02:01; PIK3CA; R38C; 1
VTLECLCEA

SEQ ID NO: 19725 - protein, 9 aa, Homo sapiens
  Table A; HLA-A*02:01; PIK3CA; R38H; 1
VTLECLHEA

SEQ ID NO: 19726 - protein, 9 aa, Homo sapiens
  Table A; HLA-A*02:05; PIK3CA; R38H; 0
VTLECLHEA

SEQ ID NO: 19727 - protein, 9 aa, Homo sapiens
  Table A; HLA-A*02:06; PIK3CA; R38H; 0
VTLECLHEA

SEQ ID NO: 19728 - protein, 9 aa, Homo sapiens
  Table A; HLA-B*50:01; PIK3CA; R38H; 0
VTLECLHEA

SEQ ID NO: 19729 - protein, 10 aa, Homo sapiens
  Table A; HLA-B*15:01; PIK3CA; E81K; 0
VTQEAEREKF

SEQ ID NO: 19730 - protein, 10 aa, Homo sapiens
  Table A; HLA-B*57:01; PIK3CA; E81K; 0
VTQEAEREKF

SEQ ID NO: 19731 - protein, 10 aa, Homo sapiens
  Table A; HLA-B*58:01; PIK3CA; E81K; 0
VTQEAEREKF

SEQ ID NO: 19732 - protein, 9 aa, Homo sapiens
  Table A; HLA-A*02:08; PCBP1; L100Q; 0
VTQRLVVPA

SEQ ID NO: 19733 - protein, 9 aa, Homo sapiens
  Table A; HLA-A*68:02; PCBP1; L100Q; 0
VTQRLVVPA

SEQ ID NO: 19734 - protein, 9 aa, Homo sapiens
  Table A; HLA-B*54:01; PCBP1; L100Q; 0
VTQRLVVPA

SEQ ID NO: 19735 - protein, 9 aa, Homo sapiens
  Table A; HLA-A*03:01; KRAS; G12A; 1
VVGAAGVGK

SEQ ID NO: 19736 - protein, 9 aa, Homo sapiens
  Table A; HLA-A*03:02; KRAS; G12A; 0
VVGAAGVGK

SEQ ID NO: 19737 - protein, 9 aa, Homo sapiens
  Table A; HLA-A*11:01; KRAS; G12A; 1
VVGAAGVGK

SEQ ID NO: 19738 - protein, 9 aa, Homo sapiens
  Table A; HLA-A*68:01; KRAS; G12A; 1
VVGAAGVGK

SEQ ID NO: 19739 - protein, 9 aa, Homo sapiens
  Table A; HLA-B*27:02; KRAS; G12A; 0
VVGAAGVGK

SEQ ID NO: 19740 - protein, 10 aa, Homo sapiens
  Table A; HLA-C*08:03; KRAS; G12A; 0
VVGAAGVGKS

SEQ ID NO: 19741 - protein, 9 aa, Homo sapiens
  Table A; HLA-A*03:01; KRAS; G12C; 1
VVGACGVGK

SEQ ID NO: 19742 - protein, 9 aa, Homo sapiens
  Table A; HLA-A*03:02; KRAS; G12C; 0
VVGACGVGK

SEQ ID NO: 19743 - protein, 9 aa, Homo sapiens
  Table A; HLA-A*11:01; KRAS; G12C; 1
VVGACGVGK

SEQ ID NO: 19744 - protein, 9 aa, Homo sapiens
  Table A; HLA-A*03:01; NRAS; G12C; 1
VVGACGVGK

SEQ ID NO: 19745 - protein, 9 aa, Homo sapiens
  Table A; HLA-A*03:02; NRAS; G12C; 0
VVGACGVGK

SEQ ID NO: 19746 - protein, 9 aa, Homo sapiens
  Table A; HLA-A*11:01; NRAS; G12C; 0
VVGACGVGK

SEQ ID NO: 19747 - protein, 9 aa, Homo sapiens
  Table A; HLA-A*03:01; KRAS; G12D; 1
VVGADGVGK

SEQ ID NO: 19748 - protein, 9 aa, Homo sapiens
  Table A; HLA-A*03:02; KRAS; G12D; 1
VVGADGVGK

SEQ ID NO: 19749 - protein, 9 aa, Homo sapiens
  Table A; HLA-A*11:01; KRAS; G12D; 1
VVGADGVGK

SEQ ID NO: 19750 - protein, 9 aa, Homo sapiens
  Table A; HLA-A*03:01; NRAS; G12D; 1
VVGADGVGK

SEQ ID NO: 19751 - protein, 9 aa, Homo sapiens
  Table A; HLA-A*03:02; NRAS; G12D; 0
VVGADGVGK

SEQ ID NO: 19752 - protein, 9 aa, Homo sapiens
  Table A; HLA-A*11:01; NRAS; G12D; 1
VVGADGVGK

SEQ ID NO: 19753 - protein, 10 aa, Homo sapiens
  Table A; HLA-C*08:03; KRAS; G12D; 0
VVGADGVGKS

SEQ ID NO: 19754 - protein, 10 aa, Homo sapiens
  Table A; HLA-C*08:03; NRAS; G12D; 0
VVGADGVGKS

SEQ ID NO: 19755 - protein, 9 aa, Homo sapiens
  Table A; HLA-A*03:01; KRAS; G13C; 1
VVGAGCVGK

SEQ ID NO: 19756 - protein, 9 aa, Homo sapiens
  Table A; HLA-A*03:02; KRAS; G13C; 0
VVGAGCVGK

SEQ ID NO: 19757 - protein, 9 aa, Homo sapiens
  Table A; HLA-A*11:01; KRAS; G13C; 1
VVGAGCVGK

SEQ ID NO: 19758 - protein, 9 aa, Homo sapiens
  Table A; HLA-A*03:01; KRAS; G13D; 1
VVGAGDVGK

SEQ ID NO: 19759 - protein, 9 aa, Homo sapiens
  Table A; HLA-A*03:02; KRAS; G13D; 0
VVGAGDVGK

SEQ ID NO: 19760 - protein, 9 aa, Homo sapiens
  Table A; HLA-A*11:01; KRAS; G13D; 1
VVGAGDVGK

SEQ ID NO: 19761 - protein, 9 aa, Homo sapiens
  Table A; HLA-A*68:01; KRAS; G13D; 1
VVGAGDVGK

SEQ ID NO: 19762 - protein, 10 aa, Homo sapiens
  Table A; HLA-C*08:03; KRAS; G13D; 0
VVGAGDVGKS

SEQ ID NO: 19763 - protein, 9 aa, Homo sapiens
  Table A; HLA-A*03:01; NRAS; G13R; 1
VVGAGRVGK

SEQ ID NO: 19764 - protein, 9 aa, Homo sapiens
  Table A; HLA-A*03:02; NRAS; G13R; 0
VVGAGRVGK

SEQ ID NO: 19765 - protein, 9 aa, Homo sapiens
  Table A; HLA-A*11:01; NRAS; G13R; 0
VVGAGRVGK

SEQ ID NO: 19766 - protein, 9 aa, Homo sapiens
  Table A; HLA-A*68:01; NRAS; G13R; 0
VVGAGRVGK

SEQ ID NO: 19767 - protein, 9 aa, Homo sapiens
  Table A; HLA-A*03:01; KRAS; G12R; 1
VVGARGVGK

SEQ ID NO: 19768 - protein, 9 aa, Homo sapiens
  Table A; HLA-A*03:02; KRAS; G12R; 0
VVGARGVGK

SEQ ID NO: 19769 - protein, 9 aa, Homo sapiens
  Table A; HLA-A*11:01; KRAS; G12R; 1
VVGARGVGK

SEQ ID NO: 19770 - protein, 9 aa, Homo sapiens
  Table A; HLA-A*03:01; KRAS; G12S; 1
VVGASGVGK

SEQ ID NO: 19771 - protein, 9 aa, Homo sapiens
  Table A; HLA-A*03:02; KRAS; G12S; 0
VVGASGVGK

SEQ ID NO: 19772 - protein, 9 aa, Homo sapiens
  Table A; HLA-A*11:01; KRAS; G12S; 1
VVGASGVGK

SEQ ID NO: 19773 - protein, 9 aa, Homo sapiens
  Table A; HLA-A*68:01; KRAS; G12S; 0
VVGASGVGK

SEQ ID NO: 19774 - protein, 9 aa, Homo sapiens
  Table A; HLA-B*27:02; KRAS; G12S; 0
VVGASGVGK

SEQ ID NO: 19775 - protein, 10 aa, Homo sapiens
  Table A; HLA-C*08:03; KRAS; G12S; 0
VVGASGVGKS

SEQ ID NO: 19776 - protein, 9 aa, Homo sapiens
  Table A; HLA-A*02:01; KRAS; G12V; 1
VVGAVGVGK

SEQ ID NO: 19777 - protein, 9 aa, Homo sapiens
  Table A; HLA-A*03:01; KRAS; G12V; 1
VVGAVGVGK

SEQ ID NO: 19778 - protein, 9 aa, Homo sapiens
  Table A; HLA-A*03:02; KRAS; G12V; 1
VVGAVGVGK

SEQ ID NO: 19779 - protein, 9 aa, Homo sapiens
  Table A; HLA-A*11:01; KRAS; G12V; 1
VVGAVGVGK

SEQ ID NO: 19780 - protein, 9 aa, Homo sapiens
  Table A; HLA-A*26:03; KRAS; G12V; 0
VVGAVGVGK

SEQ ID NO: 19781 - protein, 9 aa, Homo sapiens
  Table A; HLA-A*30:01; KRAS; G12V; 1
VVGAVGVGK

SEQ ID NO: 19782 - protein, 9 aa, Homo sapiens
  Table A; HLA-A*31:01; KRAS; G12V; 1
VVGAVGVGK

SEQ ID NO: 19783 - protein, 9 aa, Homo sapiens
  Table A; HLA-A*33:03; KRAS; G12V; 0
VVGAVGVGK

SEQ ID NO: 19784 - protein, 9 aa, Homo sapiens
  Table A; HLA-A*68:01; KRAS; G12V; 1
VVGAVGVGK

SEQ ID NO: 19785 - protein, 9 aa, Homo sapiens
  Table A; HLA-B*27:02; KRAS; G12V; 1
VVGAVGVGK

SEQ ID NO: 19786 - protein, 10 aa, Homo sapiens
  Table A; HLA-B*48:01; KRAS; G12V; 0
VVGAVGVGKS

SEQ ID NO: 19787 - protein, 10 aa, Homo sapiens
  Table A; HLA-C*08:03; KRAS; G12V; 0
VVGAVGVGKS

SEQ ID NO: 19788 - protein, 8 aa, Homo sapiens
  Table A; HLA-A*31:01; CNTNAP2; R283H; 0
VVIEHQGR

SEQ ID NO: 19789 - protein, 8 aa, Homo sapiens
  Table A; HLA-A*33:03; CNTNAP2; R283H; 0
VVIEHQGR

SEQ ID NO: 19790 - protein, 8 aa, Homo sapiens
  Table A; HLA-A*68:01; CNTNAP2; R283H; 0
VVIEHQGR

SEQ ID NO: 19791 - protein, 10 aa, Homo sapiens
  Table A; HLA-A*02:03; CNTNAP2; R283H; 0
VVIEHQGRSI

SEQ ID NO: 19792 - protein, 9 aa, Homo sapiens
  Table A; HLA-A*02:04; VHL; L89H; 0
VVLPVWHNF

SEQ ID NO: 19793 - protein, 9 aa, Homo sapiens
  Table A; HLA-A*23:01; VHL; L89H; 0
VVLPVWHNF

SEQ ID NO: 19794 - protein, 9 aa, Homo sapiens
  Table A; HLA-A*24:02; VHL; L89H; 1
VVLPVWHNF

SEQ ID NO: 19795 - protein, 9 aa, Homo sapiens
  Table A; HLA-A*29:02; VHL; L89H; 1
VVLPVWHNF

SEQ ID NO: 19796 - protein, 9 aa, Homo sapiens
  Table A; HLA-B*57:01; VHL; L89H; 1
VVLPVWHNF

SEQ ID NO: 19797 - protein, 9 aa, Homo sapiens
  Table A; HLA-A*02:01; EGFR; G598V; 1
VVMGENNTL

SEQ ID NO: 19798 - protein, 9 aa, Homo sapiens
  Table A; HLA-A*02:04; EGFR; G598V; 0
VVMGENNTL

SEQ ID NO: 19799 - protein, 9 aa, Homo sapiens
  Table A; HLA-A*02:05; EGFR; G598V; 0
VVMGENNTL

SEQ ID NO: 19800 - protein, 9 aa, Homo sapiens
  Table A; HLA-A*02:06; EGFR; G598V; 0
VVMGENNTL

SEQ ID NO: 19801 - protein, 9 aa, Homo sapiens
  Table A; HLA-A*02:08; EGFR; G598V; 0
VVMGENNTL

SEQ ID NO: 19802 - protein, 9 aa, Homo sapiens
  Table A; HLA-B*13:01; EGFR; G598V; 0
VVMGENNTL

SEQ ID NO: 19803 - protein, 9 aa, Homo sapiens
  Table A; HLA-B*15:01; EGFR; G598V; 1
VVMGENNTL

SEQ ID NO: 19804 - protein, 9 aa, Homo sapiens
  Table A; HLA-B*15:02; EGFR; G598V; 0
VVMGENNTL

SEQ ID NO: 19805 - protein, 9 aa, Homo sapiens
  Table A; HLA-B*35:02; EGFR; G598V; 0
VVMGENNTL

SEQ ID NO: 19806 - protein, 9 aa, Homo sapiens
  Table A; HLA-B*35:03; EGFR; G598V; 0
VVMGENNTL

SEQ ID NO: 19807 - protein, 9 aa, Homo sapiens
  Table A; HLA-B*35:12; EGFR; G598V; 0
VVMGENNTL

SEQ ID NO: 19808 - protein, 9 aa, Homo sapiens
  Table A; HLA-B*38:01; EGFR; G598V; 1
VVMGENNTL

SEQ ID NO: 19809 - protein, 9 aa, Homo sapiens
  Table A; HLA-B*48:01; EGFR; G598V; 0
VVMGENNTL

SEQ ID NO: 19810 - protein, 9 aa, Homo sapiens
  Table A; HLA-B*50:01; EGFR; G598V; 0
VVMGENNTL

SEQ ID NO: 19811 - protein, 9 aa, Homo sapiens
  Table A; HLA-B*58:01; EGFR; G598V; 0
VVMGENNTL

SEQ ID NO: 19812 - protein, 9 aa, Homo sapiens
  Table A; HLA-C*03:03; EGFR; G598V; 1
VVMGENNTL

SEQ ID NO: 19813 - protein, 9 aa, Homo sapiens
  Table A; HLA-C*03:04; EGFR; G598V; 1
VVMGENNTL

SEQ ID NO: 19814 - protein, 9 aa, Homo sapiens
  Table A; HLA-C*08:01; EGFR; G598V; 0
VVMGENNTL

SEQ ID NO: 19815 - protein, 10 aa, Homo sapiens
  Table A; HLA-B*50:01; EGFR; G598V; 0
VVMGENNTLV

SEQ ID NO: 19816 - protein, 11 aa, Homo sapiens
  Table A; HLA-A*11:01; EGFR; G598V; 1
VVMGENNTLVW

SEQ ID NO: 19817 - protein, 11 aa, Homo sapiens
  Table A; HLA-A*25:01; EGFR; G598V; 1
VVMGENNTLVW

SEQ ID NO: 19818 - protein, 11 aa, Homo sapiens
  Table A; HLA-B*57:01; EGFR; G598V; 1
VVMGENNTLVW

SEQ ID NO: 19819 - protein, 8 aa, Homo sapiens
  Table A; HLA-A*02:04; XPO1; E571K; 0
VVNKLFKF

SEQ ID NO: 19820 - protein, 8 aa, Homo sapiens
  Table A; HLA-A*23:01; XPO1; E571K; 0
VVNKLFKF

SEQ ID NO: 19821 - protein, 8 aa, Homo sapiens
  Table A; HLA-A*24:02; XPO1; E571K; 1
VVNKLFKF

SEQ ID NO: 19822 - protein, 8 aa, Homo sapiens
  Table A; HLA-B*57:01; XPO1; E571K; 0
VVNKLFKF

SEQ ID NO: 19823 - protein, 11 aa, Homo sapiens
  Table A; HLA-A*31:01; PIK3CA; G106V; 0
VVNREEKILNR

SEQ ID NO: 19824 - protein, 9 aa, Homo sapiens
  Table A; HLA-A*02:01; TP53; Y220C; 1
VVPCEPPEV

SEQ ID NO: 19825 - protein, 9 aa, Homo sapiens
  Table A; HLA-A*02:06; TP53; Y220C; 0
VVPCEPPEV

SEQ ID NO: 19826 - protein, 9 aa, Homo sapiens
  Table A; HLA-A*02:07; TP53; Y220C; 0
VVPCEPPEV

SEQ ID NO: 19827 - protein, 10 aa, Homo sapiens
  Table A; HLA-A*31:01; TP53; C176F; 0
VVRRFPHHER

SEQ ID NO: 19828 - protein, 11 aa, Homo sapiens
  Table A; HLA-A*68:01; FBXW7; R479Q; 0
VVSGSQDATLR

SEQ ID NO: 19829 - protein, 8 aa, Homo sapiens
  Table A; HLA-A*02:03; KRAS; G12A; 0
VVVGAAGV

SEQ ID NO: 19830 - protein, 8 aa, Homo sapiens
  Table A; HLA-B*13:02; KRAS; G12A; 1
VVVGAAGV

SEQ ID NO: 19831 - protein, 10 aa, Homo sapiens
  Table A; HLA-A*03:01; KRAS; G12A; 1
VVVGAAGVGK

SEQ ID NO: 19832 - protein, 10 aa, Homo sapiens
  Table A; HLA-A*03:02; KRAS; G12A; 0
VVVGAAGVGK

SEQ ID NO: 19833 - protein, 10 aa, Homo sapiens
  Table A; HLA-A*11:01; KRAS; G12A; 1
VVVGAAGVGK

SEQ ID NO: 19834 - protein, 10 aa, Homo sapiens
  Table A; HLA-A*26:03; KRAS; G12A; 0
VVVGAAGVGK

SEQ ID NO: 19835 - protein, 10 aa, Homo sapiens
  Table A; HLA-A*30:01; KRAS; G12A; 0
VVVGAAGVGK

SEQ ID NO: 19836 - protein, 10 aa, Homo sapiens
  Table A; HLA-A*68:01; KRAS; G12A; 1
VVVGAAGVGK

SEQ ID NO: 19837 - protein, 10 aa, Homo sapiens
  Table A; HLA-A*68:02; KRAS; G12A; 0
VVVGAAGVGK

SEQ ID NO: 19838 - protein, 10 aa, Homo sapiens
  Table A; HLA-B*27:02; KRAS; G12A; 0
VVVGAAGVGK

SEQ ID NO: 19839 - protein, 11 aa, Homo sapiens
  Table A; HLA-A*02:06; KRAS; G12A; 0
VVVGAAGVGKS

SEQ ID NO: 19840 - protein, 11 aa, Homo sapiens
  Table A; HLA-A*03:02; KRAS; G12A; 0
VVVGAAGVGKS

SEQ ID NO: 19841 - protein, 11 aa, Homo sapiens
  Table A; HLA-A*11:01; KRAS; G12A; 1
VVVGAAGVGKS

SEQ ID NO: 19842 - protein, 11 aa, Homo sapiens
  Table A; HLA-A*26:01; KRAS; G12A; 1
VVVGAAGVGKS

SEQ ID NO: 19843 - protein, 11 aa, Homo sapiens
  Table A; HLA-A*68:01; KRAS; G12A; 1
VVVGAAGVGKS

SEQ ID NO: 19844 - protein, 11 aa, Homo sapiens
  Table A; HLA-B*48:01; KRAS; G12A; 0
VVVGAAGVGKS

SEQ ID NO: 19845 - protein, 11 aa, Homo sapiens
  Table A; HLA-C*07:04; KRAS; G12A; 0
VVVGAAGVGKS

SEQ ID NO: 19846 - protein, 11 aa, Homo sapiens
  Table A; HLA-C*08:03; KRAS; G12A; 0
VVVGAAGVGKS

SEQ ID NO: 19847 - protein, 8 aa, Homo sapiens
  Table A; HLA-B*13:02; NRAS; G12C; 0
VVVGACGV

SEQ ID NO: 19848 - protein, 10 aa, Homo sapiens
  Table A; HLA-A*03:01; KRAS; G12C; 1
VVVGACGVGK

SEQ ID NO: 19849 - protein, 10 aa, Homo sapiens
  Table A; HLA-A*03:02; KRAS; G12C; 0
VVVGACGVGK

SEQ ID NO: 19850 - protein, 10 aa, Homo sapiens
  Table A; HLA-A*11:01; KRAS; G12C; 1
VVVGACGVGK

SEQ ID NO: 19851 - protein, 10 aa, Homo sapiens
  Table A; HLA-A*26:03; KRAS; G12C; 0
VVVGACGVGK

SEQ ID NO: 19852 - protein, 10 aa, Homo sapiens
  Table A; HLA-A*68:01; KRAS; G12C; 1
VVVGACGVGK

SEQ ID NO: 19853 - protein, 10 aa, Homo sapiens
  Table A; HLA-B*27:02; KRAS; G12C; 0
VVVGACGVGK

SEQ ID NO: 19854 - protein, 10 aa, Homo sapiens
  Table A; HLA-A*03:01; NRAS; G12C; 1
VVVGACGVGK

SEQ ID NO: 19855 - protein, 10 aa, Homo sapiens
  Table A; HLA-A*03:02; NRAS; G12C; 0
VVVGACGVGK

SEQ ID NO: 19856 - protein, 10 aa, Homo sapiens
  Table A; HLA-A*11:01; NRAS; G12C; 0
VVVGACGVGK

SEQ ID NO: 19857 - protein, 10 aa, Homo sapiens
  Table A; HLA-A*26:03; NRAS; G12C; 0
VVVGACGVGK

SEQ ID NO: 19858 - protein, 10 aa, Homo sapiens
  Table A; HLA-A*68:01; NRAS; G12C; 0
VVVGACGVGK

SEQ ID NO: 19859 - protein, 10 aa, Homo sapiens
  Table A; HLA-B*27:02; NRAS; G12C; 0
VVVGACGVGK

SEQ ID NO: 19860 - protein, 8 aa, Homo sapiens
  Table A; HLA-B*13:02; KRAS; G12D; 1
VVVGADGV

SEQ ID NO: 19861 - protein, 8 aa, Homo sapiens
  Table A; HLA-B*13:02; NRAS; G12D; 0
VVVGADGV

SEQ ID NO: 19862 - protein, 10 aa, Homo sapiens
  Table A; HLA-A*02:06; KRAS; G12D; 1
VVVGADGVGK

SEQ ID NO: 19863 - protein, 10 aa, Homo sapiens
  Table A; HLA-A*03:01; KRAS; G12D; 1
VVVGADGVGK

SEQ ID NO: 19864 - protein, 10 aa, Homo sapiens
  Table A; HLA-A*03:02; KRAS; G12D; 1
VVVGADGVGK

SEQ ID NO: 19865 - protein, 10 aa, Homo sapiens
  Table A; HLA-A*11:01; KRAS; G12D; 1
VVVGADGVGK

SEQ ID NO: 19866 - protein, 10 aa, Homo sapiens
  Table A; HLA-A*26:03; KRAS; G12D; 0
VVVGADGVGK

SEQ ID NO: 19867 - protein, 10 aa, Homo sapiens
  Table A; HLA-A*30:01; KRAS; G12D; 1
VVVGADGVGK

SEQ ID NO: 19868 - protein, 10 aa, Homo sapiens
  Table A; HLA-A*68:01; KRAS; G12D; 1
VVVGADGVGK

SEQ ID NO: 19869 - protein, 10 aa, Homo sapiens
  Table A; HLA-A*68:02; KRAS; G12D; 1
VVVGADGVGK

SEQ ID NO: 19870 - protein, 10 aa, Homo sapiens
  Table A; HLA-B*27:02; KRAS; G12D; 1
VVVGADGVGK

SEQ ID NO: 19871 - protein, 10 aa, Homo sapiens
  Table A; HLA-B*48:01; KRAS; G12D; 0
VVVGADGVGK

SEQ ID NO: 19872 - protein, 10 aa, Homo sapiens
  Table A; HLA-A*02:06; NRAS; G12D; 0
VVVGADGVGK

SEQ ID NO: 19873 - protein, 10 aa, Homo sapiens
  Table A; HLA-A*03:01; NRAS; G12D; 1
VVVGADGVGK

SEQ ID NO: 19874 - protein, 10 aa, Homo sapiens
  Table A; HLA-A*03:02; NRAS; G12D; 0
VVVGADGVGK

SEQ ID NO: 19875 - protein, 10 aa, Homo sapiens
  Table A; HLA-A*11:01; NRAS; G12D; 1
VVVGADGVGK

SEQ ID NO: 19876 - protein, 10 aa, Homo sapiens
  Table A; HLA-A*26:03; NRAS; G12D; 0
VVVGADGVGK

SEQ ID NO: 19877 - protein, 10 aa, Homo sapiens
  Table A; HLA-A*30:01; NRAS; G12D; 0
VVVGADGVGK

SEQ ID NO: 19878 - protein, 10 aa, Homo sapiens
  Table A; HLA-A*68:01; NRAS; G12D; 0
VVVGADGVGK

SEQ ID NO: 19879 - protein, 10 aa, Homo sapiens
  Table A; HLA-A*68:02; NRAS; G12D; 0
VVVGADGVGK

SEQ ID NO: 19880 - protein, 10 aa, Homo sapiens
  Table A; HLA-B*27:02; NRAS; G12D; 0
VVVGADGVGK

SEQ ID NO: 19881 - protein, 10 aa, Homo sapiens
  Table A; HLA-B*48:01; NRAS; G12D; 0
VVVGADGVGK

SEQ ID NO: 19882 - protein, 11 aa, Homo sapiens
  Table A; HLA-A*02:05; KRAS; G12D; 1
VVVGADGVGKS

SEQ ID NO: 19883 - protein, 11 aa, Homo sapiens
  Table A; HLA-A*02:06; KRAS; G12D; 1
VVVGADGVGKS

SEQ ID NO: 19884 - protein, 11 aa, Homo sapiens
  Table A; HLA-A*11:01; KRAS; G12D; 1
VVVGADGVGKS

SEQ ID NO: 19885 - protein, 11 aa, Homo sapiens
  Table A; HLA-A*26:01; KRAS; G12D; 1
VVVGADGVGKS

SEQ ID NO: 19886 - protein, 11 aa, Homo sapiens
  Table A; HLA-A*68:01; KRAS; G12D; 1
VVVGADGVGKS

SEQ ID NO: 19887 - protein, 11 aa, Homo sapiens
  Table A; HLA-B*48:01; KRAS; G12D; 0
VVVGADGVGKS

SEQ ID NO: 19888 - protein, 11 aa, Homo sapiens
  Table A; HLA-C*07:04; KRAS; G12D; 1
VVVGADGVGKS

SEQ ID NO: 19889 - protein, 11 aa, Homo sapiens
  Table A; HLA-C*08:03; KRAS; G12D; 0
VVVGADGVGKS

SEQ ID NO: 19890 - protein, 11 aa, Homo sapiens
  Table A; HLA-A*02:05; NRAS; G12D; 0
VVVGADGVGKS

SEQ ID NO: 19891 - protein, 11 aa, Homo sapiens
  Table A; HLA-A*02:06; NRAS; G12D; 0
VVVGADGVGKS

SEQ ID NO: 19892 - protein, 11 aa, Homo sapiens
  Table A; HLA-A*11:01; NRAS; G12D; 1
VVVGADGVGKS

SEQ ID NO: 19893 - protein, 11 aa, Homo sapiens
  Table A; HLA-A*26:01; NRAS; G12D; 0
VVVGADGVGKS

SEQ ID NO: 19894 - protein, 11 aa, Homo sapiens
  Table A; HLA-A*68:01; NRAS; G12D; 0
VVVGADGVGKS

SEQ ID NO: 19895 - protein, 11 aa, Homo sapiens
  Table A; HLA-B*48:01; NRAS; G12D; 0
VVVGADGVGKS

SEQ ID NO: 19896 - protein, 11 aa, Homo sapiens
  Table A; HLA-C*07:04; NRAS; G12D; 0
VVVGADGVGKS

SEQ ID NO: 19897 - protein, 11 aa, Homo sapiens
  Table A; HLA-C*08:03; NRAS; G12D; 0
VVVGADGVGKS

SEQ ID NO: 19898 - protein, 10 aa, Homo sapiens
  Table A; HLA-A*03:01; KRAS; G13C; 1
VVVGAGCVGK

SEQ ID NO: 19899 - protein, 10 aa, Homo sapiens
  Table A; HLA-A*03:02; KRAS; G13C; 0
VVVGAGCVGK

SEQ ID NO: 19900 - protein, 10 aa, Homo sapiens
  Table A; HLA-A*11:01; KRAS; G13C; 1
VVVGAGCVGK

SEQ ID NO: 19901 - protein, 10 aa, Homo sapiens
  Table A; HLA-A*26:03; KRAS; G13C; 0
VVVGAGCVGK

SEQ ID NO: 19902 - protein, 10 aa, Homo sapiens
  Table A; HLA-A*68:01; KRAS; G13C; 0
VVVGAGCVGK

SEQ ID NO: 19903 - protein, 10 aa, Homo sapiens
  Table A; HLA-B*27:02; KRAS; G13C; 0
VVVGAGCVGK

SEQ ID NO: 19904 - protein, 9 aa, Homo sapiens
  Table A; HLA-B*39:01; KRAS; G13D; 0
VVVGAGDVG

SEQ ID NO: 19905 - protein, 10 aa, Homo sapiens
  Table A; HLA-A*02:06; KRAS; G13D; 0
VVVGAGDVGK

SEQ ID NO: 19906 - protein, 10 aa, Homo sapiens
  Table A; HLA-A*03:01; KRAS; G13D; 1
VVVGAGDVGK

SEQ ID NO: 19907 - protein, 10 aa, Homo sapiens
  Table A; HLA-A*03:02; KRAS; G13D; 0
VVVGAGDVGK

SEQ ID NO: 19908 - protein, 10 aa, Homo sapiens
  Table A; HLA-A*11:01; KRAS; G13D; 1
VVVGAGDVGK

SEQ ID NO: 19909 - protein, 10 aa, Homo sapiens
  Table A; HLA-A*26:03; KRAS; G13D; 0
VVVGAGDVGK

SEQ ID NO: 19910 - protein, 10 aa, Homo sapiens
  Table A; HLA-A*68:01; KRAS; G13D; 1
VVVGAGDVGK

SEQ ID NO: 19911 - protein, 10 aa, Homo sapiens
  Table A; HLA-A*68:02; KRAS; G13D; 0
VVVGAGDVGK

SEQ ID NO: 19912 - protein, 10 aa, Homo sapiens
  Table A; HLA-B*27:02; KRAS; G13D; 0
VVVGAGDVGK

SEQ ID NO: 19913 - protein, 10 aa, Homo sapiens
  Table A; HLA-B*57:01; KRAS; G13D; 1
VVVGAGDVGK

SEQ ID NO: 19914 - protein, 11 aa, Homo sapiens
  Table A; HLA-A*02:05; KRAS; G13D; 0
VVVGAGDVGKS

SEQ ID NO: 19915 - protein, 11 aa, Homo sapiens
  Table A; HLA-A*26:01; KRAS; G13D; 1
VVVGAGDVGKS

SEQ ID NO: 19916 - protein, 11 aa, Homo sapiens
  Table A; HLA-A*68:01; KRAS; G13D; 1
VVVGAGDVGKS

SEQ ID NO: 19917 - protein, 11 aa, Homo sapiens
  Table A; HLA-B*48:01; KRAS; G13D; 0
VVVGAGDVGKS

SEQ ID NO: 19918 - protein, 11 aa, Homo sapiens
  Table A; HLA-C*07:04; KRAS; G13D; 0
VVVGAGDVGKS

SEQ ID NO: 19919 - protein, 11 aa, Homo sapiens
  Table A; HLA-C*08:01; KRAS; G13D; 0
VVVGAGDVGKS

SEQ ID NO: 19920 - protein, 11 aa, Homo sapiens
  Table A; HLA-C*08:03; KRAS; G13D; 0
VVVGAGDVGKS

SEQ ID NO: 19921 - protein, 8 aa, Homo sapiens
  Table A; HLA-B*13:02; NRAS; G13R; 0
VVVGAGRV

SEQ ID NO: 19922 - protein, 8 aa, Homo sapiens
  Table A; HLA-C*07:04; NRAS; G13R; 0
VVVGAGRV

SEQ ID NO: 19923 - protein, 10 aa, Homo sapiens
  Table A; HLA-A*03:01; NRAS; G13R; 1
VVVGAGRVGK

SEQ ID NO: 19924 - protein, 10 aa, Homo sapiens
  Table A; HLA-A*03:02; NRAS; G13R; 0
VVVGAGRVGK

SEQ ID NO: 19925 - protein, 10 aa, Homo sapiens
  Table A; HLA-A*11:01; NRAS; G13R; 0
VVVGAGRVGK

SEQ ID NO: 19926 - protein, 10 aa, Homo sapiens
  Table A; HLA-A*26:03; NRAS; G13R; 0
VVVGAGRVGK

SEQ ID NO: 19927 - protein, 10 aa, Homo sapiens
  Table A; HLA-A*31:01; NRAS; G13R; 0
VVVGAGRVGK

SEQ ID NO: 19928 - protein, 10 aa, Homo sapiens
  Table A; HLA-A*68:01; NRAS; G13R; 0
VVVGAGRVGK

SEQ ID NO: 19929 - protein, 10 aa, Homo sapiens
  Table A; HLA-B*57:01; NRAS; G13R; 0
VVVGAGRVGK

SEQ ID NO: 19930 - protein, 11 aa, Homo sapiens
  Table A; HLA-A*11:01; NRAS; G13R; 0
VVVGAGRVGKS

SEQ ID NO: 19931 - protein, 11 aa, Homo sapiens
  Table A; HLA-B*48:01; NRAS; G13R; 0
VVVGAGRVGKS

SEQ ID NO: 19932 - protein, 8 aa, Homo sapiens
  Table A; HLA-B*13:02; KRAS; G12R; 1
VVVGARGV

SEQ ID NO: 19933 - protein, 10 aa, Homo sapiens
  Table A; HLA-A*03:01; KRAS; G12R; 1
VVVGARGVGK

SEQ ID NO: 19934 - protein, 10 aa, Homo sapiens
  Table A; HLA-A*03:02; KRAS; G12R; 0
VVVGARGVGK

SEQ ID NO: 19935 - protein, 10 aa, Homo sapiens
  Table A; HLA-A*11:01; KRAS; G12R; 1
VVVGARGVGK

SEQ ID NO: 19936 - protein, 10 aa, Homo sapiens
  Table A; HLA-A*26:03; KRAS; G12R; 0
VVVGARGVGK

SEQ ID NO: 19937 - protein, 10 aa, Homo sapiens
  Table A; HLA-A*68:01; KRAS; G12R; 1
VVVGARGVGK

SEQ ID NO: 19938 - protein, 11 aa, Homo sapiens
  Table A; HLA-B*48:01; KRAS; G12R; 0
VVVGARGVGKS

SEQ ID NO: 19939 - protein, 8 aa, Homo sapiens
  Table A; HLA-A*02:03; KRAS; G12S; 0
VVVGASGV

SEQ ID NO: 19940 - protein, 8 aa, Homo sapiens
  Table A; HLA-A*02:06; KRAS; G12S; 0
VVVGASGV

SEQ ID NO: 19941 - protein, 8 aa, Homo sapiens
  Table A; HLA-B*13:02; KRAS; G12S; 0
VVVGASGV

SEQ ID NO: 19942 - protein, 10 aa, Homo sapiens
  Table A; HLA-A*03:01; KRAS; G12S; 1
VVVGASGVGK

SEQ ID NO: 19943 - protein, 10 aa, Homo sapiens
  Table A; HLA-A*03:02; KRAS; G12S; 0
VVVGASGVGK

SEQ ID NO: 19944 - protein, 10 aa, Homo sapiens
  Table A; HLA-A*11:01; KRAS; G12S; 1
VVVGASGVGK

SEQ ID NO: 19945 - protein, 10 aa, Homo sapiens
  Table A; HLA-A*26:03; KRAS; G12S; 0
VVVGASGVGK

SEQ ID NO: 19946 - protein, 10 aa, Homo sapiens
  Table A; HLA-A*30:01; KRAS; G12S; 0
VVVGASGVGK

SEQ ID NO: 19947 - protein, 10 aa, Homo sapiens
  Table A; HLA-A*31:01; KRAS; G12S; 0
VVVGASGVGK

SEQ ID NO: 19948 - protein, 10 aa, Homo sapiens
  Table A; HLA-A*33:03; KRAS; G12S; 0
VVVGASGVGK

SEQ ID NO: 19949 - protein, 10 aa, Homo sapiens
  Table A; HLA-A*68:01; KRAS; G12S; 0
VVVGASGVGK

SEQ ID NO: 19950 - protein, 10 aa, Homo sapiens
  Table A; HLA-A*68:02; KRAS; G12S; 0
VVVGASGVGK

SEQ ID NO: 19951 - protein, 10 aa, Homo sapiens
  Table A; HLA-B*27:02; KRAS; G12S; 0
VVVGASGVGK

SEQ ID NO: 19952 - protein, 11 aa, Homo sapiens
  Table A; HLA-A*02:05; KRAS; G12S; 0
VVVGASGVGKS

SEQ ID NO: 19953 - protein, 11 aa, Homo sapiens
  Table A; HLA-A*02:06; KRAS; G12S; 0
VVVGASGVGKS

SEQ ID NO: 19954 - protein, 11 aa, Homo sapiens
  Table A; HLA-A*02:08; KRAS; G12S; 0
VVVGASGVGKS

SEQ ID NO: 19955 - protein, 11 aa, Homo sapiens
  Table A; HLA-A*03:01; KRAS; G12S; 1
VVVGASGVGKS

SEQ ID NO: 19956 - protein, 11 aa, Homo sapiens
  Table A; HLA-A*03:02; KRAS; G12S; 0
VVVGASGVGKS

SEQ ID NO: 19957 - protein, 11 aa, Homo sapiens
  Table A; HLA-A*11:01; KRAS; G12S; 1
VVVGASGVGKS

SEQ ID NO: 19958 - protein, 11 aa, Homo sapiens
  Table A; HLA-A*26:01; KRAS; G12S; 0
VVVGASGVGKS

SEQ ID NO: 19959 - protein, 11 aa, Homo sapiens
  Table A; HLA-A*26:03; KRAS; G12S; 0
VVVGASGVGKS

SEQ ID NO: 19960 - protein, 11 aa, Homo sapiens
  Table A; HLA-A*68:01; KRAS; G12S; 0
VVVGASGVGKS

SEQ ID NO: 19961 - protein, 11 aa, Homo sapiens
  Table A; HLA-B*48:01; KRAS; G12S; 0
VVVGASGVGKS

SEQ ID NO: 19962 - protein, 11 aa, Homo sapiens
  Table A; HLA-C*07:04; KRAS; G12S; 0
VVVGASGVGKS

SEQ ID NO: 19963 - protein, 11 aa, Homo sapiens
  Table A; HLA-C*08:03; KRAS; G12S; 0
VVVGASGVGKS

SEQ ID NO: 19964 - protein, 8 aa, Homo sapiens
  Table A; HLA-A*02:03; KRAS; G12V; 0
VVVGAVGV

SEQ ID NO: 19965 - protein, 8 aa, Homo sapiens
  Table A; HLA-A*02:05; KRAS; G12V; 1
VVVGAVGV

SEQ ID NO: 19966 - protein, 8 aa, Homo sapiens
  Table A; HLA-A*02:06; KRAS; G12V; 1
VVVGAVGV

SEQ ID NO: 19967 - protein, 8 aa, Homo sapiens
  Table A; HLA-A*68:02; KRAS; G12V; 1
VVVGAVGV

SEQ ID NO: 19968 - protein, 8 aa, Homo sapiens
  Table A; HLA-B*13:02; KRAS; G12V; 1
VVVGAVGV

SEQ ID NO: 19969 - protein, 8 aa, Homo sapiens
  Table A; HLA-B*39:06; KRAS; G12V; 1
VVVGAVGV

SEQ ID NO: 19970 - protein, 8 aa, Homo sapiens
  Table A; HLA-B*40:02; KRAS; G12V; 1
VVVGAVGV

SEQ ID NO: 19971 - protein, 8 aa, Homo sapiens
  Table A; HLA-B*48:01; KRAS; G12V; 0
VVVGAVGV

SEQ ID NO: 19972 - protein, 9 aa, Homo sapiens
  Table A; HLA-A*26:01; KRAS; G12V; 1
VVVGAVGVG

SEQ ID NO: 19973 - protein, 10 aa, Homo sapiens
  Table A; HLA-A*02:08; KRAS; G12V; 0
VVVGAVGVGK

SEQ ID NO: 19974 - protein, 10 aa, Homo sapiens
  Table A; HLA-A*03:01; KRAS; G12V; 1
VVVGAVGVGK

SEQ ID NO: 19975 - protein, 10 aa, Homo sapiens
  Table A; HLA-A*03:02; KRAS; G12V; 1
VVVGAVGVGK

SEQ ID NO: 19976 - protein, 10 aa, Homo sapiens
  Table A; HLA-A*11:01; KRAS; G12V; 1
VVVGAVGVGK

SEQ ID NO: 19977 - protein, 10 aa, Homo sapiens
  Table A; HLA-A*26:03; KRAS; G12V; 0
VVVGAVGVGK

SEQ ID NO: 19978 - protein, 10 aa, Homo sapiens
  Table A; HLA-A*30:01; KRAS; G12V; 1
VVVGAVGVGK

SEQ ID NO: 19979 - protein, 10 aa, Homo sapiens
  Table A; HLA-A*31:01; KRAS; G12V; 1
VVVGAVGVGK

SEQ ID NO: 19980 - protein, 10 aa, Homo sapiens
  Table A; HLA-A*33:03; KRAS; G12V; 0
VVVGAVGVGK

SEQ ID NO: 19981 - protein, 10 aa, Homo sapiens
  Table A; HLA-A*68:01; KRAS; G12V; 1
VVVGAVGVGK

SEQ ID NO: 19982 - protein, 10 aa, Homo sapiens
  Table A; HLA-A*68:02; KRAS; G12V; 1
VVVGAVGVGK

SEQ ID NO: 19983 - protein, 10 aa, Homo sapiens
  Table A; HLA-B*27:02; KRAS; G12V; 1
VVVGAVGVGK

SEQ ID NO: 19984 - protein, 10 aa, Homo sapiens
  Table A; HLA-B*27:05; KRAS; G12V; 1
VVVGAVGVGK

SEQ ID NO: 19985 - protein, 10 aa, Homo sapiens
  Table A; HLA-B*57:01; KRAS; G12V; 1
VVVGAVGVGK

SEQ ID NO: 19986 - protein, 11 aa, Homo sapiens
  Table A; HLA-A*02:06; KRAS; G12V; 1
VVVGAVGVGKS

SEQ ID NO: 19987 - protein, 11 aa, Homo sapiens
  Table A; HLA-A*26:01; KRAS; G12V; 1
VVVGAVGVGKS

SEQ ID NO: 19988 - protein, 11 aa, Homo sapiens
  Table A; HLA-A*68:01; KRAS; G12V; 1
VVVGAVGVGKS

SEQ ID NO: 19989 - protein, 11 aa, Homo sapiens
  Table A; HLA-B*48:01; KRAS; G12V; 0
VVVGAVGVGKS

SEQ ID NO: 19990 - protein, 11 aa, Homo sapiens
  Table A; HLA-C*07:04; KRAS; G12V; 1
VVVGAVGVGKS

SEQ ID NO: 19991 - protein, 11 aa, Homo sapiens
  Table A; HLA-C*08:03; KRAS; G12V; 0
VVVGAVGVGKS

SEQ ID NO: 19992 - protein, 10 aa, Homo sapiens
  Table A; HLA-A*02:01; TP53; Y220C; 1
VVVPCEPPEV

SEQ ID NO: 19993 - protein, 10 aa, Homo sapiens
  Table A; HLA-A*02:06; TP53; Y220C; 0
VVVPCEPPEV

SEQ ID NO: 19994 - protein, 10 aa, Homo sapiens
  Table A; HLA-A*02:07; TP53; Y220C; 0
VVVPCEPPEV

SEQ ID NO: 19995 - protein, 9 aa, Homo sapiens
  Table A; HLA-A*23:01; CDKN2A; H83Y; 0
VYDAAREGF

SEQ ID NO: 19996 - protein, 9 aa, Homo sapiens
  Table A; HLA-A*24:02; CDKN2A; H83Y; 1
VYDAAREGF

SEQ ID NO: 19997 - protein, 9 aa, Homo sapiens
  Table A; HLA-B*15:03; CDKN2A; H83Y; 0
VYDAAREGF

SEQ ID NO: 19998 - protein, 9 aa, Homo sapiens
  Table A; HLA-B*38:01; CDKN2A; H83Y; 0
VYDAAREGF

SEQ ID NO: 19999 - protein, 9 aa, Homo sapiens
  Table A; HLA-C*04:01; CDKN2A; H83Y; 1
VYDAAREGF

SEQ ID NO: 20000 - protein, 9 aa, Homo sapiens
  Table A; HLA-C*05:01; CDKN2A; H83Y; 1
VYDAAREGF

SEQ ID NO: 20001 - protein, 9 aa, Homo sapiens
  Table A; HLA-C*07:02; CDKN2A; H83Y; 1
VYDAAREGF

SEQ ID NO: 20002 - protein, 9 aa, Homo sapiens
  Table A; HLA-C*08:02; CDKN2A; H83Y; 0
VYDAAREGF

SEQ ID NO: 20003 - protein, 9 aa, Homo sapiens
  Table A; HLA-C*14:02; CDKN2A; H83Y; 0
VYDAAREGF

SEQ ID NO: 20004 - protein, 9 aa, Homo sapiens
  Table A; HLA-C*14:03; CDKN2A; H83Y; 0
VYDAAREGF

SEQ ID NO: 20005 - protein, 10 aa, Homo sapiens
  Table A; HLA-C*04:01; CDKN2A; H83Y; 1
VYDAAREGFL

SEQ ID NO: 20006 - protein, 9 aa, Homo sapiens
  Table A; HLA-A*23:01; EZH2; M667T; 0
VYDKYTCSF

SEQ ID NO: 20007 - protein, 9 aa, Homo sapiens
  Table A; HLA-A*24:02; EZH2; M667T; 1
VYDKYTCSF

SEQ ID NO: 20008 - protein, 9 aa, Homo sapiens
  Table A; HLA-C*04:01; EZH2; M667T; 1
VYDKYTCSF

SEQ ID NO: 20009 - protein, 9 aa, Homo sapiens
  Table A; HLA-A*02:01; EP300; D1399N; 1
VYISYLNSV

SEQ ID NO: 20010 - protein, 9 aa, Homo sapiens
  Table A; HLA-A*02:03; EP300; D1399N; 0
VYISYLNSV

SEQ ID NO: 20011 - protein, 9 aa, Homo sapiens
  Table A; HLA-A*02:04; EP300; D1399N; 0
VYISYLNSV

SEQ ID NO: 20012 - protein, 9 aa, Homo sapiens
  Table A; HLA-A*23:01; EP300; D1399N; 0
VYISYLNSV

SEQ ID NO: 20013 - protein, 9 aa, Homo sapiens
  Table A; HLA-A*24:02; EP300; D1399N; 1
VYISYLNSV

SEQ ID NO: 20014 - protein, 9 aa, Homo sapiens
  Table A; HLA-B*46:01; EP300; D1399N; 0
VYISYLNSV

SEQ ID NO: 20015 - protein, 9 aa, Homo sapiens
  Table A; HLA-B*48:01; EP300; D1399N; 0
VYISYLNSV

SEQ ID NO: 20016 - protein, 9 aa, Homo sapiens
  Table A; HLA-C*06:02; EP300; D1399N; 1
VYISYLNSV

SEQ ID NO: 20017 - protein, 9 aa, Homo sapiens
  Table A; HLA-C*14:02; EP300; D1399N; 0
VYISYLNSV

SEQ ID NO: 20018 - protein, 9 aa, Homo sapiens
  Table A; HLA-C*14:03; EP300; D1399N; 0
VYISYLNSV

SEQ ID NO: 20019 - protein, 9 aa, Homo sapiens
  Table A; HLA-C*16:02; EP300; D1399N; 0
VYISYLNSV

SEQ ID NO: 20020 - protein, 11 aa, Homo sapiens
  Table A; HLA-A*23:01; EP300; D1399N; 0
VYISYLNSVHF

SEQ ID NO: 20021 - protein, 11 aa, Homo sapiens
  Table A; HLA-A*24:02; EP300; D1399N; 1
VYISYLNSVHF

SEQ ID NO: 20022 - protein, 9 aa, Homo sapiens
  Table A; HLA-A*03:01; CNBD1; L396P; 1
VYMGKPKEK

SEQ ID NO: 20023 - protein, 9 aa, Homo sapiens
  Table A; HLA-A*03:02; CNBD1; L396P; 0
VYMGKPKEK

SEQ ID NO: 20024 - protein, 9 aa, Homo sapiens
  Table A; HLA-A*11:01; CNBD1; L396P; 1
VYMGKPKEK

SEQ ID NO: 20025 - protein, 9 aa, Homo sapiens
  Table A; HLA-A*24:02; CNBD1; L396P; 1
VYMGKPKEK

SEQ ID NO: 20026 - protein, 9 aa, Homo sapiens
  Table A; HLA-A*31:01; CNBD1; L396P; 0
VYMGKPKEK

SEQ ID NO: 20027 - protein, 9 aa, Homo sapiens
  Table A; HLA-A*33:01; CNBD1; L396P; 0
VYMGKPKEK

SEQ ID NO: 20028 - protein, 9 aa, Homo sapiens
  Table A; HLA-A*33:03; CNBD1; L396P; 0
VYMGKPKEK

SEQ ID NO: 20029 - protein, 9 aa, Homo sapiens
  Table A; HLA-C*14:02; CNBD1; L396P; 0
VYMGKPKEK

SEQ ID NO: 20030 - protein, 10 aa, Homo sapiens
  Table A; HLA-A*33:03; SMAD4; G352V; 0
VYVDPSGGDR

SEQ ID NO: 20031 - protein, 10 aa, Homo sapiens
  Table A; HLA-B*39:01; SMAD4; G352V; 0
VYVDPSGGDR

SEQ ID NO: 20032 - protein, 11 aa, Homo sapiens
  Table A; HLA-A*23:01; SMAD4; G352V; 0
VYVDPSGGDRF

SEQ ID NO: 20033 - protein, 11 aa, Homo sapiens
  Table A; HLA-A*24:02; SMAD4; G352V; 1
VYVDPSGGDRF

SEQ ID NO: 20034 - protein, 11 aa, Homo sapiens
  Table A; HLA-A*29:02; SMAD4; G352V; 0
VYVDPSGGDRF

SEQ ID NO: 20035 - protein, 11 aa, Homo sapiens
  Table A; HLA-A*31:01; SMAD4; G352V; 0
VYVDPSGGDRF

SEQ ID NO: 20036 - protein, 11 aa, Homo sapiens
  Table A; HLA-A*33:03; SMAD4; G352V; 0
VYVDPSGGDRF

SEQ ID NO: 20037 - protein, 11 aa, Homo sapiens
  Table A; HLA-B*13:01; SMAD4; G352V; 0
VYVDPSGGDRF

SEQ ID NO: 20038 - protein, 11 aa, Homo sapiens
  Table A; HLA-B*15:03; SMAD4; G352V; 0
VYVDPSGGDRF

SEQ ID NO: 20039 - protein, 11 aa, Homo sapiens
  Table A; HLA-B*35:01; SMAD4; G352V; 1
VYVDPSGGDRF

SEQ ID NO: 20040 - protein, 11 aa, Homo sapiens
  Table A; HLA-B*38:01; SMAD4; G352V; 0
VYVDPSGGDRF

SEQ ID NO: 20041 - protein, 11 aa, Homo sapiens
  Table A; HLA-B*39:01; SMAD4; G352V; 0
VYVDPSGGDRF

SEQ ID NO: 20042 - protein, 11 aa, Homo sapiens
  Table A; HLA-B*44:05; SMAD4; G352V; 0
VYVDPSGGDRF

SEQ ID NO: 20043 - protein, 11 aa, Homo sapiens
  Table A; HLA-B*48:01; SMAD4; G352V; 0
VYVDPSGGDRF

SEQ ID NO: 20044 - protein, 11 aa, Homo sapiens
  Table A; HLA-C*08:03; SMAD4; G352V; 0
VYVDPSGGDRF

SEQ ID NO: 20045 - protein, 11 aa, Homo sapiens
  Table A; HLA-C*14:02; SMAD4; G352V; 0
VYVDPSGGDRF

SEQ ID NO: 20046 - protein, 11 aa, Homo sapiens
  Table A; HLA-C*14:03; SMAD4; G352V; 0
VYVDPSGGDRF

SEQ ID NO: 20047 - protein, 9 aa, Homo sapiens
  Table A; HLA-C*03:04; CSMD3; R2601Q; 1
WACDRGFQL

SEQ ID NO: 20048 - protein, 9 aa, Homo sapiens
  Table A; HLA-A*02:03; PIK3CA; R93W; 0
WLFQPFLKV

SEQ ID NO: 20049 - protein, 9 aa, Homo sapiens
  Table A; HLA-A*02:04; PIK3CA; R93W; 0
WLFQPFLKV

SEQ ID NO: 20050 - protein, 9 aa, Homo sapiens
  Table A; HLA-A*02:07; PIK3CA; R93W; 0
WLFQPFLKV

SEQ ID NO: 20051 - protein, 9 aa, Homo sapiens
  Table A; HLA-B*54:01; FGFR2; S252W; 0
WPHRPILQA

SEQ ID NO: 20052 - protein, 9 aa, Homo sapiens
  Table A; HLA-B*35:01; TP53; R249W; 0
WPILTIITL

SEQ ID NO: 20053 - protein, 9 aa, Homo sapiens
  Table A; HLA-B*35:03; TP53; R249W; 0
WPILTIITL

SEQ ID NO: 20054 - protein, 9 aa, Homo sapiens
  Table A; HLA-B*51:01; TP53; R249W; 0
WPILTIITL

SEQ ID NO: 20055 - protein, 9 aa, Homo sapiens
  Table A; HLA-B*54:01; TP53; R249W; 0
WPILTIITL

SEQ ID NO: 20056 - protein, 9 aa, Homo sapiens
  Table A; HLA-B*15:01; CTNNB1; S33F; 1
WQQQSYLDF

SEQ ID NO: 20057 - protein, 9 aa, Homo sapiens
  Table A; HLA-B*15:01; CTNNB1; S33Y; 1
WQQQSYLDY

SEQ ID NO: 20058 - protein, 9 aa, Homo sapiens
  Table A; HLA-B*15:02; CTNNB1; S33Y; 0
WQQQSYLDY

SEQ ID NO: 20059 - protein, 9 aa, Homo sapiens
  Table A; HLA-B*15:03; CTNNB1; S33Y; 0
WQQQSYLDY

SEQ ID NO: 20060 - protein, 8 aa, Homo sapiens
  Table A; HLA-B*13:02; CTNNB1; D32V; 1
WQQQSYLV

SEQ ID NO: 20061 - protein, 8 aa, Homo sapiens
  Table A; HLA-B*39:01; CTNNB1; D32V; 0
WQQQSYLV

SEQ ID NO: 20062 - protein, 8 aa, Homo sapiens
  Table A; HLA-B*39:06; CTNNB1; D32V; 0
WQQQSYLV

SEQ ID NO: 20063 - protein, 8 aa, Homo sapiens
  Table A; HLA-A*30:02; CTNNB1; D32Y; 0
WQQQSYLY

SEQ ID NO: 20064 - protein, 8 aa, Homo sapiens
  Table A; HLA-B*15:01; CTNNB1; D32Y; 1
WQQQSYLY

SEQ ID NO: 20065 - protein, 8 aa, Homo sapiens
  Table A; HLA-B*15:02; CTNNB1; D32Y; 0
WQQQSYLY

SEQ ID NO: 20066 - protein, 8 aa, Homo sapiens
  Table A; HLA-B*15:03; CTNNB1; D32Y; 0
WQQQSYLY

SEQ ID NO: 20067 - protein, 8 aa, Homo sapiens
  Table A; HLA-B*27:02; CTNNB1; D32Y; 0
WQQQSYLY

SEQ ID NO: 20068 - protein, 8 aa, Homo sapiens
  Table A; HLA-B*39:01; CTNNB1; D32Y; 0
WQQQSYLY

SEQ ID NO: 20069 - protein, 9 aa, Homo sapiens
  Table A; HLA-B*39:06; NFE2L2; D29G; 0
WRQDIGLGV

SEQ ID NO: 20070 - protein, 9 aa, Homo sapiens
  Table A; HLA-A*02:03; IDH1; R132L; 0
WVKPIIIGL

SEQ ID NO: 20071 - protein, 9 aa, Homo sapiens
  Table A; HLA-A*02:04; IDH1; R132L; 0
WVKPIIIGL

SEQ ID NO: 20072 - protein, 8 aa, Homo sapiens
  Table A; HLA-B*15:02; CTCF; K365T; 0
YASVEVST

SEQ ID NO: 20073 - protein, 8 aa, Homo sapiens
  Table A; HLA-B*35:02; CTCF; K365T; 0
YASVEVST

SEQ ID NO: 20074 - protein, 8 aa, Homo sapiens
  Table A; HLA-B*35:08; CTCF; K365T; 0
YASVEVST

SEQ ID NO: 20075 - protein, 8 aa, Homo sapiens
  Table A; HLA-B*35:12; CTCF; K365T; 0
YASVEVST

SEQ ID NO: 20076 - protein, 9 aa, Homo sapiens
  Table A; HLA-A*02:01; CTCF; K365T; 1
YASVEVSTL

SEQ ID NO: 20077 - protein, 9 aa, Homo sapiens
  Table A; HLA-A*02:03; CTCF; K365T; 0
YASVEVSTL

SEQ ID NO: 20078 - protein, 9 aa, Homo sapiens
  Table A; HLA-A*02:04; CTCF; K365T; 0
YASVEVSTL

SEQ ID NO: 20079 - protein, 9 aa, Homo sapiens
  Table A; HLA-A*02:05; CTCF; K365T; 0
YASVEVSTL

SEQ ID NO: 20080 - protein, 9 aa, Homo sapiens
  Table A; HLA-A*02:06; CTCF; K365T; 0
YASVEVSTL

SEQ ID NO: 20081 - protein, 9 aa, Homo sapiens
  Table A; HLA-A*25:01; CTCF; K365T; 0
YASVEVSTL

SEQ ID NO: 20082 - protein, 9 aa, Homo sapiens
  Table A; HLA-A*30:01; CTCF; K365T; 0
YASVEVSTL

SEQ ID NO: 20083 - protein, 9 aa, Homo sapiens
  Table A; HLA-A*68:01; CTCF; K365T; 0
YASVEVSTL

SEQ ID NO: 20084 - protein, 9 aa, Homo sapiens
  Table A; HLA-A*68:02; CTCF; K365T; 0
YASVEVSTL

SEQ ID NO: 20085 - protein, 9 aa, Homo sapiens
  Table A; HLA-B*07:02; CTCF; K365T; 1
YASVEVSTL

SEQ ID NO: 20086 - protein, 9 aa, Homo sapiens
  Table A; HLA-B*08:01; CTCF; K365T; 1
YASVEVSTL

SEQ ID NO: 20087 - protein, 9 aa, Homo sapiens
  Table A; HLA-B*15:01; CTCF; K365T; 1
YASVEVSTL

SEQ ID NO: 20088 - protein, 9 aa, Homo sapiens
  Table A; HLA-B*15:02; CTCF; K365T; 0
YASVEVSTL

SEQ ID NO: 20089 - protein, 9 aa, Homo sapiens
  Table A; HLA-B*15:10; CTCF; K365T; 0
YASVEVSTL

SEQ ID NO: 20090 - protein, 9 aa, Homo sapiens
  Table A; HLA-B*15:13; CTCF; K365T; 0
YASVEVSTL

SEQ ID NO: 20091 - protein, 9 aa, Homo sapiens
  Table A; HLA-B*35:01; CTCF; K365T; 1
YASVEVSTL

SEQ ID NO: 20092 - protein, 9 aa, Homo sapiens
  Table A; HLA-B*35:02; CTCF; K365T; 0
YASVEVSTL

SEQ ID NO: 20093 - protein, 9 aa, Homo sapiens
  Table A; HLA-B*35:03; CTCF; K365T; 0
YASVEVSTL

SEQ ID NO: 20094 - protein, 9 aa, Homo sapiens
  Table A; HLA-B*35:08; CTCF; K365T; 0
YASVEVSTL

SEQ ID NO: 20095 - protein, 9 aa, Homo sapiens
  Table A; HLA-B*35:12; CTCF; K365T; 0
YASVEVSTL

SEQ ID NO: 20096 - protein, 9 aa, Homo sapiens
  Table A; HLA-B*38:01; CTCF; K365T; 0
YASVEVSTL

SEQ ID NO: 20097 - protein, 9 aa, Homo sapiens
  Table A; HLA-B*39:01; CTCF; K365T; 0
YASVEVSTL

SEQ ID NO: 20098 - protein, 9 aa, Homo sapiens
  Table A; HLA-B*40:01; CTCF; K365T; 1
YASVEVSTL

SEQ ID NO: 20099 - protein, 9 aa, Homo sapiens
  Table A; HLA-B*40:02; CTCF; K365T; 0
YASVEVSTL

SEQ ID NO: 20100 - protein, 9 aa, Homo sapiens
  Table A; HLA-B*44:05; CTCF; K365T; 0
YASVEVSTL

SEQ ID NO: 20101 - protein, 9 aa, Homo sapiens
  Table A; HLA-B*46:01; CTCF; K365T; 0
YASVEVSTL

SEQ ID NO: 20102 - protein, 9 aa, Homo sapiens
  Table A; HLA-B*48:01; CTCF; K365T; 0
YASVEVSTL

SEQ ID NO: 20103 - protein, 9 aa, Homo sapiens
  Table A; HLA-B*50:01; CTCF; K365T; 0
YASVEVSTL

SEQ ID NO: 20104 - protein, 9 aa, Homo sapiens
  Table A; HLA-B*51:01; CTCF; K365T; 1
YASVEVSTL

SEQ ID NO: 20105 - protein, 9 aa, Homo sapiens
  Table A; HLA-B*54:01; CTCF; K365T; 0
YASVEVSTL

SEQ ID NO: 20106 - protein, 9 aa, Homo sapiens
  Table A; HLA-B*57:01; CTCF; K365T; 0
YASVEVSTL

SEQ ID NO: 20107 - protein, 9 aa, Homo sapiens
  Table A; HLA-B*58:01; CTCF; K365T; 0
YASVEVSTL

SEQ ID NO: 20108 - protein, 9 aa, Homo sapiens
  Table A; HLA-C*01:02; CTCF; K365T; 0
YASVEVSTL

SEQ ID NO: 20109 - protein, 9 aa, Homo sapiens
  Table A; HLA-C*02:02; CTCF; K365T; 0
YASVEVSTL

SEQ ID NO: 20110 - protein, 9 aa, Homo sapiens
  Table A; HLA-C*03:02; CTCF; K365T; 0
YASVEVSTL

SEQ ID NO: 20111 - protein, 9 aa, Homo sapiens
  Table A; HLA-C*03:03; CTCF; K365T; 1
YASVEVSTL

SEQ ID NO: 20112 - protein, 9 aa, Homo sapiens
  Table A; HLA-C*03:04; CTCF; K365T; 1
YASVEVSTL

SEQ ID NO: 20113 - protein, 9 aa, Homo sapiens
  Table A; HLA-C*05:01; CTCF; K365T; 1
YASVEVSTL

SEQ ID NO: 20114 - protein, 9 aa, Homo sapiens
  Table A; HLA-C*07:04; CTCF; K365T; 0
YASVEVSTL

SEQ ID NO: 20115 - protein, 9 aa, Homo sapiens
  Table A; HLA-C*08:01; CTCF; K365T; 0
YASVEVSTL

SEQ ID NO: 20116 - protein, 9 aa, Homo sapiens
  Table A; HLA-C*08:02; CTCF; K365T; 0
YASVEVSTL

SEQ ID NO: 20117 - protein, 9 aa, Homo sapiens
  Table A; HLA-C*08:03; CTCF; K365T; 0
YASVEVSTL

SEQ ID NO: 20118 - protein, 9 aa, Homo sapiens
  Table A; HLA-C*12:03; CTCF; K365T; 1
YASVEVSTL

SEQ ID NO: 20119 - protein, 9 aa, Homo sapiens
  Table A; HLA-C*14:03; CTCF; K365T; 0
YASVEVSTL

SEQ ID NO: 20120 - protein, 9 aa, Homo sapiens
  Table A; HLA-C*15:02; CTCF; K365T; 0
YASVEVSTL

SEQ ID NO: 20121 - protein, 9 aa, Homo sapiens
  Table A; HLA-C*16:01; CTCF; K365T; 0
YASVEVSTL

SEQ ID NO: 20122 - protein, 9 aa, Homo sapiens
  Table A; HLA-C*16:02; CTCF; K365T; 0
YASVEVSTL

SEQ ID NO: 20123 - protein, 9 aa, Homo sapiens
  Table A; HLA-C*16:04; CTCF; K365T; 0
YASVEVSTL

SEQ ID NO: 20124 - protein, 9 aa, Homo sapiens
  Table A; HLA-C*17:01; CTCF; K365T; 0
YASVEVSTL

SEQ ID NO: 20125 - protein, 10 aa, Homo sapiens
  Table A; HLA-A*68:01; CTCF; K365T; 0
YASVEVSTLK

SEQ ID NO: 20126 - protein, 10 aa, Homo sapiens
  Table A; HLA-A*68:02; CTCF; K365T; 0
YASVEVSTLK

SEQ ID NO: 20127 - protein, 10 aa, Homo sapiens
  Table A; HLA-B*27:02; CTCF; K365T; 0
YASVEVSTLK

SEQ ID NO: 20128 - protein, 11 aa, Homo sapiens
  Table A; HLA-A*68:01; CTCF; K365T; 0
YASVEVSTLKR

SEQ ID NO: 20129 - protein, 11 aa, Homo sapiens
  Table A; HLA-B*27:02; CTCF; K365T; 0
YASVEVSTLKR

SEQ ID NO: 20130 - protein, 8 aa, Homo sapiens
  Table A; HLA-B*35:01; KEAP1; G480W; 0
YAVGGFDW

SEQ ID NO: 20131 - protein, 8 aa, Homo sapiens
  Table A; HLA-B*54:01; KEAP1; G480W; 0
YAVGGFDW

SEQ ID NO: 20132 - protein, 8 aa, Homo sapiens
  Table A; HLA-B*57:01; KEAP1; G480W; 0
YAVGGFDW

SEQ ID NO: 20133 - protein, 8 aa, Homo sapiens
  Table A; HLA-B*58:01; KEAP1; G480W; 0
YAVGGFDW

SEQ ID NO: 20134 - protein, 8 aa, Homo sapiens
  Table A; HLA-C*16:01; KEAP1; G480W; 0
YAVGGFDW

SEQ ID NO: 20135 - protein, 8 aa, Homo sapiens
  Table A; HLA-B*54:01; CDKN2A; D108Y; 0
YAWGRLPV

SEQ ID NO: 20136 - protein, 10 aa, Homo sapiens
  Table A; HLA-A*02:07; CDKN2A; D108Y; 0
YAWGRLPVDL

SEQ ID NO: 20137 - protein, 11 aa, Homo sapiens
  Table A; HLA-B*54:01; CDKN2A; D108Y; 0
YAWGRLPVDLA

SEQ ID NO: 20138 - protein, 8 aa, Homo sapiens
  Table A; HLA-B*37:01; CDKN2A; H83Y; 0
YDAAREGF

SEQ ID NO: 20139 - protein, 8 aa, Homo sapiens
  Table A; HLA-B*41:02; CDKN2A; H83Y; 0
YDAAREGF

SEQ ID NO: 20140 - protein, 8 aa, Homo sapiens
  Table A; HLA-A*23:01; DCAF12L2; R378H; 0
YDIHAQKF

SEQ ID NO: 20141 - protein, 8 aa, Homo sapiens
  Table A; HLA-B*18:01; DCAF12L2; R378H; 0
YDIHAQKF

SEQ ID NO: 20142 - protein, 8 aa, Homo sapiens
  Table A; HLA-B*27:05; DCAF12L2; R378H; 0
YDIHAQKF

SEQ ID NO: 20143 - protein, 8 aa, Homo sapiens
  Table A; HLA-B*37:01; DCAF12L2; R378H; 0
YDIHAQKF

SEQ ID NO: 20144 - protein, 8 aa, Homo sapiens
  Table A; HLA-B*40:02; DCAF12L2; R378H; 0
YDIHAQKF

SEQ ID NO: 20145 - protein, 8 aa, Homo sapiens
  Table A; HLA-B*41:02; DCAF12L2; R378H; 0
YDIHAQKF

SEQ ID NO: 20146 - protein, 8 aa, Homo sapiens
  Table A; HLA-B*44:03; DCAF12L2; R378H; 0
YDIHAQKF

SEQ ID NO: 20147 - protein, 8 aa, Homo sapiens
  Table A; HLA-B*44:05; DCAF12L2; R378H; 0
YDIHAQKF

SEQ ID NO: 20148 - protein, 9 aa, Homo sapiens
  Table A; HLA-B*37:01; CSMD3; S300F; 0
YDYLEIEGF

SEQ ID NO: 20149 - protein, 9 aa, Homo sapiens
  Table A; HLA-B*49:01; MB21D2; Q311E; 0
YEACKAIII

SEQ ID NO: 20150 - protein, 8 aa, Homo sapiens
  Table A; HLA-B*40:02; CTNNB1; K335I; 0
YEILLWTT

SEQ ID NO: 20151 - protein, 8 aa, Homo sapiens
  Table A; HLA-B*50:01; CTNNB1; K335I; 0
YEILLWTT

SEQ ID NO: 20152 - protein, 8 aa, Homo sapiens
  Table A; HLA-B*54:01; CTNNB1; K335I; 0
YEILLWTT

SEQ ID NO: 20153 - protein, 9 aa, Homo sapiens
  Table A; HLA-B*49:01; CTNNB1; K335I; 0
YEILLWTTS

SEQ ID NO: 20154 - protein, 9 aa, Homo sapiens
  Table A; HLA-B*50:01; CTNNB1; K335I; 0
YEILLWTTS

SEQ ID NO: 20155 - protein, 10 aa, Homo sapiens
  Table A; HLA-A*30:01; TP53; H179Y; 0
YERCSDSDGL

SEQ ID NO: 20156 - protein, 10 aa, Homo sapiens
  Table A; HLA-B*40:01; TP53; H179Y; 0
YERCSDSDGL

SEQ ID NO: 20157 - protein, 9 aa, Homo sapiens
  Table A; HLA-B*15:01; MYCN; P44L; 1
YFGGPDSTL

SEQ ID NO: 20158 - protein, 9 aa, Homo sapiens
  Table A; HLA-B*35:03; MYCN; P44L; 0
YFGGPDSTL

SEQ ID NO: 20159 - protein, 9 aa, Homo sapiens
  Table A; HLA-B*39:01; MYCN; P44L; 0
YFGGPDSTL

SEQ ID NO: 20160 - protein, 9 aa, Homo sapiens
  Table A; HLA-B*40:02; MYCN; P44L; 0
YFGGPDSTL

SEQ ID NO: 20161 - protein, 9 aa, Homo sapiens
  Table A; HLA-B*48:01; MYCN; P44L; 0
YFGGPDSTL

SEQ ID NO: 20162 - protein, 9 aa, Homo sapiens
  Table A; HLA-C*01:02; MYCN; P44L; 0
YFGGPDSTL

SEQ ID NO: 20163 - protein, 9 aa, Homo sapiens
  Table A; HLA-C*14:02; MYCN; P44L; 0
YFGGPDSTL

SEQ ID NO: 20164 - protein, 9 aa, Homo sapiens
  Table A; HLA-C*14:03; MYCN; P44L; 0
YFGGPDSTL

SEQ ID NO: 20165 - protein, 10 aa, Homo sapiens
  Table A; HLA-C*14:02; PIK3CA; H1047L; 0
YFMKQMNDAL

SEQ ID NO: 20166 - protein, 10 aa, Homo sapiens
  Table A; HLA-A*29:01; PIK3CA; H1047Y; 0
YFMKQMNDAY

SEQ ID NO: 20167 - protein, 10 aa, Homo sapiens
  Table A; HLA-A*29:02; PIK3CA; H1047Y; 0
YFMKQMNDAY

SEQ ID NO: 20168 - protein, 10 aa, Homo sapiens
  Table A; HLA-C*14:02; PIK3CA; H1047Y; 0
YFMKQMNDAY

SEQ ID NO: 20169 - protein, 8 aa, Homo sapiens
  Table A; HLA-C*14:02; TP53; S127F; 0
YFPALNKM

SEQ ID NO: 20170 - protein, 9 aa, Homo sapiens
  Table A; HLA-A*23:01; TP53; S127F; 0
YFPALNKMF

SEQ ID NO: 20171 - protein, 9 aa, Homo sapiens
  Table A; HLA-A*24:02; TP53; S127F; 1
YFPALNKMF

SEQ ID NO: 20172 - protein, 9 aa, Homo sapiens
  Table A; HLA-C*14:02; TP53; S127F; 0
YFPALNKMF

SEQ ID NO: 20173 - protein, 8 aa, Homo sapiens
  Table A; HLA-B*15:01; FBXW7; R465H; 1
YGHTSTVH

SEQ ID NO: 20174 - protein, 8 aa, Homo sapiens
  Table A; HLA-B*48:01; FBXW7; R465H; 0
YGHTSTVH

SEQ ID NO: 20175 - protein, 8 aa, Homo sapiens
  Table A; HLA-A*02:01; CTNNB1; S33Y; 1
YGIHSGAT

SEQ ID NO: 20176 - protein, 8 aa, Homo sapiens
  Table A; HLA-B*15:01; CTNNB1; S33Y; 1
YGIHSGAT

SEQ ID NO: 20177 - protein, 8 aa, Homo sapiens
  Table A; HLA-B*39:01; CTNNB1; S33Y; 0
YGIHSGAT

SEQ ID NO: 20178 - protein, 8 aa, Homo sapiens
  Table A; HLA-B*48:01; CTNNB1; S33Y; 0
YGIHSGAT

SEQ ID NO: 20179 - protein, 8 aa, Homo sapiens
  Table A; HLA-C*08:03; CTNNB1; S33Y; 0
YGIHSGAT

SEQ ID NO: 20180 - protein, 9 aa, Homo sapiens
  Table A; HLA-A*02:05; CTNNB1; S33Y; 0
YGIHSGATT

SEQ ID NO: 20181 - protein, 9 aa, Homo sapiens
  Table A; HLA-B*08:01; CTNNB1; S33Y; 1
YGIHSGATT

SEQ ID NO: 20182 - protein, 9 aa, Homo sapiens
  Table A; HLA-B*15:10; CTNNB1; S33Y; 0
YGIHSGATT

SEQ ID NO: 20183 - protein, 9 aa, Homo sapiens
  Table A; HLA-B*35:03; CTNNB1; S33Y; 0
YGIHSGATT

SEQ ID NO: 20184 - protein, 9 aa, Homo sapiens
  Table A; HLA-B*39:01; CTNNB1; S33Y; 0
YGIHSGATT

SEQ ID NO: 20185 - protein, 9 aa, Homo sapiens
  Table A; HLA-B*48:01; CTNNB1; S33Y; 0
YGIHSGATT

SEQ ID NO: 20186 - protein, 9 aa, Homo sapiens
  Table A; HLA-B*54:01; CTNNB1; S33Y; 0
YGIHSGATT

SEQ ID NO: 20187 - protein, 9 aa, Homo sapiens
  Table A; HLA-C*08:01; CTNNB1; S33Y; 0
YGIHSGATT

SEQ ID NO: 20188 - protein, 10 aa, Homo sapiens
  Table A; HLA-A*68:02; CTNNB1; S33Y; 0
YGIHSGATTT

SEQ ID NO: 20189 - protein, 10 aa, Homo sapiens
  Table A; HLA-B*08:01; CTNNB1; S33Y; 1
YGIHSGATTT

SEQ ID NO: 20190 - protein, 10 aa, Homo sapiens
  Table A; HLA-B*39:01; CTNNB1; S33Y; 0
YGIHSGATTT

SEQ ID NO: 20191 - protein, 10 aa, Homo sapiens
  Table A; HLA-B*48:01; CTNNB1; S33Y; 0
YGIHSGATTT

SEQ ID NO: 20192 - protein, 10 aa, Homo sapiens
  Table A; HLA-C*08:03; CTNNB1; S33Y; 0
YGIHSGATTT

SEQ ID NO: 20193 - protein, 11 aa, Homo sapiens
  Table A; HLA-A*02:01; CTNNB1; S33Y; 1
YGIHSGATTTA

SEQ ID NO: 20194 - protein, 11 aa, Homo sapiens
  Table A; HLA-A*02:03; CTNNB1; S33Y; 0
YGIHSGATTTA

SEQ ID NO: 20195 - protein, 11 aa, Homo sapiens
  Table A; HLA-A*02:05; CTNNB1; S33Y; 0
YGIHSGATTTA

SEQ ID NO: 20196 - protein, 11 aa, Homo sapiens
  Table A; HLA-A*68:01; CTNNB1; S33Y; 0
YGIHSGATTTA

SEQ ID NO: 20197 - protein, 11 aa, Homo sapiens
  Table A; HLA-A*68:02; CTNNB1; S33Y; 0
YGIHSGATTTA

SEQ ID NO: 20198 - protein, 11 aa, Homo sapiens
  Table A; HLA-B*08:01; CTNNB1; S33Y; 1
YGIHSGATTTA

SEQ ID NO: 20199 - protein, 11 aa, Homo sapiens
  Table A; HLA-B*15:01; CTNNB1; S33Y; 1
YGIHSGATTTA

SEQ ID NO: 20200 - protein, 11 aa, Homo sapiens
  Table A; HLA-B*39:01; CTNNB1; S33Y; 0
YGIHSGATTTA

SEQ ID NO: 20201 - protein, 11 aa, Homo sapiens
  Table A; HLA-B*46:01; CTNNB1; S33Y; 0
YGIHSGATTTA

SEQ ID NO: 20202 - protein, 11 aa, Homo sapiens
  Table A; HLA-B*48:01; CTNNB1; S33Y; 0
YGIHSGATTTA

SEQ ID NO: 20203 - protein, 11 aa, Homo sapiens
  Table A; HLA-B*50:01; CTNNB1; S33Y; 0
YGIHSGATTTA

SEQ ID NO: 20204 - protein, 11 aa, Homo sapiens
  Table A; HLA-B*54:01; CTNNB1; S33Y; 0
YGIHSGATTTA

SEQ ID NO: 20205 - protein, 11 aa, Homo sapiens
  Table A; HLA-C*08:03; CTNNB1; S33Y; 0
YGIHSGATTTA

SEQ ID NO: 20206 - protein, 9 aa, Homo sapiens
  Table A; HLA-B*15:10; PIK3CA; H1047Y; 0
YHGGWTTKM

SEQ ID NO: 20207 - protein, 9 aa, Homo sapiens
  Table A; HLA-B*38:01; PIK3CA; H1047Y; 0
YHGGWTTKM

SEQ ID NO: 20208 - protein, 9 aa, Homo sapiens
  Table A; HLA-A*29:02; GRIN2A; S1425L; 0
YILEHVMPY

SEQ ID NO: 20209 - protein, 9 aa, Homo sapiens
  Table A; HLA-B*15:02; GRIN2A; S1425L; 0
YILEHVMPY

SEQ ID NO: 20210 - protein, 11 aa, Homo sapiens
  Table A; HLA-A*01:01; ARHGAP5; V474A; 1
YITEADSKEAY

SEQ ID NO: 20211 - protein, 11 aa, Homo sapiens
  Table A; HLA-A*26:01; ARHGAP5; V474A; 0
YITEADSKEAY

SEQ ID NO: 20212 - protein, 11 aa, Homo sapiens
  Table A; HLA-B*15:01; ARHGAP5; V474A; 1
YITEADSKEAY

SEQ ID NO: 20213 - protein, 11 aa, Homo sapiens
  Table A; HLA-B*15:02; ARHGAP5; V474A; 0
YITEADSKEAY

SEQ ID NO: 20214 - protein, 11 aa, Homo sapiens
  Table A; HLA-B*35:01; ARHGAP5; V474A; 1
YITEADSKEAY

SEQ ID NO: 20215 - protein, 11 aa, Homo sapiens
  Table A; HLA-B*35:08; ARHGAP5; V474A; 0
YITEADSKEAY

SEQ ID NO: 20216 - protein, 11 aa, Homo sapiens
  Table A; HLA-B*39:01; ARHGAP5; V474A; 0
YITEADSKEAY

SEQ ID NO: 20217 - protein, 11 aa, Homo sapiens
  Table A; HLA-C*08:01; ARHGAP5; V474A; 0
YITEADSKEAY

SEQ ID NO: 20218 - protein, 9 aa, Homo sapiens
  Table A; HLA-B*15:03; BMP5; R208Q; 0
YKDRSNNQF

SEQ ID NO: 20219 - protein, 9 aa, Homo sapiens
  Table A; HLA-C*08:02; BMP5; R208Q; 0
YKDRSNNQF

SEQ ID NO: 20220 - protein, 9 aa, Homo sapiens
  Table A; HLA-B*39:06; KRAS; G12A; 0
YKLVVVGAA

SEQ ID NO: 20221 - protein, 9 aa, Homo sapiens
  Table A; HLA-B*15:10; STAG1; A116T; 0
YKQDRDITL

SEQ ID NO: 20222 - protein, 9 aa, Homo sapiens
  Table A; HLA-B*39:01; STAG1; A116T; 0
YKQDRDITL

SEQ ID NO: 20223 - protein, 9 aa, Homo sapiens
  Table A; HLA-B*41:02; STAG1; A116T; 0
YKQDRDITL

SEQ ID NO: 20224 - protein, 9 aa, Homo sapiens
  Table A; HLA-B*48:01; STAG1; A116T; 0
YKQDRDITL

SEQ ID NO: 20225 - protein, 9 aa, Homo sapiens
  Table A; HLA-A*02:01; CTNNB1; S33C; 1
YLDCGIHSG

SEQ ID NO: 20226 - protein, 10 aa, Homo sapiens
  Table A; HLA-A*02:01; CTNNB1; S33C; 1
YLDCGIHSGA

SEQ ID NO: 20227 - protein, 10 aa, Homo sapiens
  Table A; HLA-A*02:03; CTNNB1; S33C; 0
YLDCGIHSGA

SEQ ID NO: 20228 - protein, 10 aa, Homo sapiens
  Table A; HLA-A*02:07; CTNNB1; S33C; 0
YLDCGIHSGA

SEQ ID NO: 20229 - protein, 10 aa, Homo sapiens
  Table A; HLA-A*68:02; CTNNB1; S33C; 0
YLDCGIHSGA

SEQ ID NO: 20230 - protein, 9 aa, Homo sapiens
  Table A; HLA-A*02:01; TP53; R213Q; 1
YLDDRNTFQ

SEQ ID NO: 20231 - protein, 9 aa, Homo sapiens
  Table A; HLA-A*02:07; TP53; R213Q; 0
YLDDRNTFQ

SEQ ID NO: 20232 - protein, 9 aa, Homo sapiens
  Table A; HLA-A*02:01; CTNNB1; S33F; 1
YLDFGIHSG

SEQ ID NO: 20233 - protein, 9 aa, Homo sapiens
  Table A; HLA-A*02:04; CTNNB1; S33F; 0
YLDFGIHSG

SEQ ID NO: 20234 - protein, 9 aa, Homo sapiens
  Table A; HLA-A*02:07; CTNNB1; S33F; 0
YLDFGIHSG

SEQ ID NO: 20235 - protein, 10 aa, Homo sapiens
  Table A; HLA-A*01:01; CTNNB1; S33F; 1
YLDFGIHSGA

SEQ ID NO: 20236 - protein, 10 aa, Homo sapiens
  Table A; HLA-A*02:01; CTNNB1; S33F; 1
YLDFGIHSGA

SEQ ID NO: 20237 - protein, 10 aa, Homo sapiens
  Table A; HLA-A*02:03; CTNNB1; S33F; 0
YLDFGIHSGA

SEQ ID NO: 20238 - protein, 10 aa, Homo sapiens
  Table A; HLA-A*02:04; CTNNB1; S33F; 0
YLDFGIHSGA

SEQ ID NO: 20239 - protein, 10 aa, Homo sapiens
  Table A; HLA-A*02:05; CTNNB1; S33F; 0
YLDFGIHSGA

SEQ ID NO: 20240 - protein, 10 aa, Homo sapiens
  Table A; HLA-A*02:07; CTNNB1; S33F; 0
YLDFGIHSGA

SEQ ID NO: 20241 - protein, 10 aa, Homo sapiens
  Table A; HLA-A*29:02; CTNNB1; S33F; 1
YLDFGIHSGA

SEQ ID NO: 20242 - protein, 10 aa, Homo sapiens
  Table A; HLA-A*68:02; CTNNB1; S33F; 0
YLDFGIHSGA

SEQ ID NO: 20243 - protein, 10 aa, Homo sapiens
  Table A; HLA-B*13:02; CTNNB1; S33F; 1
YLDFGIHSGA

SEQ ID NO: 20244 - protein, 10 aa, Homo sapiens
  Table A; HLA-B*27:02; CTNNB1; S33F; 0
YLDFGIHSGA

SEQ ID NO: 20245 - protein, 10 aa, Homo sapiens
  Table A; HLA-B*48:01; CTNNB1; S33F; 0
YLDFGIHSGA

SEQ ID NO: 20246 - protein, 10 aa, Homo sapiens
  Table A; HLA-B*50:01; CTNNB1; S33F; 0
YLDFGIHSGA

SEQ ID NO: 20247 - protein, 10 aa, Homo sapiens
  Table A; HLA-B*54:01; CTNNB1; S33F; 0
YLDFGIHSGA

SEQ ID NO: 20248 - protein, 10 aa, Homo sapiens
  Table A; HLA-C*08:03; CTNNB1; S33F; 0
YLDFGIHSGA

SEQ ID NO: 20249 - protein, 11 aa, Homo sapiens
  Table A; HLA-A*02:01; CTNNB1; S33F; 1
YLDFGIHSGAT

SEQ ID NO: 20250 - protein, 11 aa, Homo sapiens
  Table A; HLA-B*48:01; CTNNB1; S33F; 0
YLDFGIHSGAT

SEQ ID NO: 20251 - protein, 9 aa, Homo sapiens
  Table A; HLA-A*02:01; CTNNB1; G34E; 1
YLDSEIHSG

SEQ ID NO: 20252 - protein, 9 aa, Homo sapiens
  Table A; HLA-A*02:04; CTNNB1; G34E; 0
YLDSEIHSG

SEQ ID NO: 20253 - protein, 9 aa, Homo sapiens
  Table A; HLA-A*02:06; CTNNB1; G34E; 0
YLDSEIHSG

SEQ ID NO: 20254 - protein, 9 aa, Homo sapiens
  Table A; HLA-A*02:07; CTNNB1; G34E; 0
YLDSEIHSG

SEQ ID NO: 20255 - protein, 9 aa, Homo sapiens
  Table A; HLA-B*39:01; CTNNB1; G34E; 0
YLDSEIHSG

SEQ ID NO: 20256 - protein, 9 aa, Homo sapiens
  Table A; HLA-C*08:02; CTNNB1; G34E; 0
YLDSEIHSG

SEQ ID NO: 20257 - protein, 10 aa, Homo sapiens
  Table A; HLA-A*01:01; CTNNB1; G34E; 1
YLDSEIHSGA

SEQ ID NO: 20258 - protein, 10 aa, Homo sapiens
  Table A; HLA-A*02:01; CTNNB1; G34E; 1
YLDSEIHSGA

SEQ ID NO: 20259 - protein, 10 aa, Homo sapiens
  Table A; HLA-A*02:03; CTNNB1; G34E; 0
YLDSEIHSGA

SEQ ID NO: 20260 - protein, 10 aa, Homo sapiens
  Table A; HLA-A*02:05; CTNNB1; G34E; 0
YLDSEIHSGA

SEQ ID NO: 20261 - protein, 10 aa, Homo sapiens
  Table A; HLA-A*02:06; CTNNB1; G34E; 0
YLDSEIHSGA

SEQ ID NO: 20262 - protein, 10 aa, Homo sapiens
  Table A; HLA-A*02:07; CTNNB1; G34E; 0
YLDSEIHSGA

SEQ ID NO: 20263 - protein, 10 aa, Homo sapiens
  Table A; HLA-A*03:02; CTNNB1; G34E; 0
YLDSEIHSGA

SEQ ID NO: 20264 - protein, 10 aa, Homo sapiens
  Table A; HLA-A*68:02; CTNNB1; G34E; 0
YLDSEIHSGA

SEQ ID NO: 20265 - protein, 10 aa, Homo sapiens
  Table A; HLA-B*13:02; CTNNB1; G34E; 0
YLDSEIHSGA

SEQ ID NO: 20266 - protein, 10 aa, Homo sapiens
  Table A; HLA-B*48:01; CTNNB1; G34E; 0
YLDSEIHSGA

SEQ ID NO: 20267 - protein, 10 aa, Homo sapiens
  Table A; HLA-B*50:01; CTNNB1; G34E; 0
YLDSEIHSGA

SEQ ID NO: 20268 - protein, 10 aa, Homo sapiens
  Table A; HLA-C*08:02; CTNNB1; G34E; 0
YLDSEIHSGA

SEQ ID NO: 20269 - protein, 10 aa, Homo sapiens
  Table A; HLA-C*08:03; CTNNB1; G34E; 0
YLDSEIHSGA

SEQ ID NO: 20270 - protein, 11 aa, Homo sapiens
  Table A; HLA-A*01:01; CTNNB1; G34E; 1
YLDSEIHSGAT

SEQ ID NO: 20271 - protein, 11 aa, Homo sapiens
  Table A; HLA-A*02:01; CTNNB1; G34E; 1
YLDSEIHSGAT

SEQ ID NO: 20272 - protein, 11 aa, Homo sapiens
  Table A; HLA-A*02:07; CTNNB1; G34E; 0
YLDSEIHSGAT

SEQ ID NO: 20273 - protein, 11 aa, Homo sapiens
  Table A; HLA-A*68:02; CTNNB1; G34E; 0
YLDSEIHSGAT

SEQ ID NO: 20274 - protein, 11 aa, Homo sapiens
  Table A; HLA-B*08:01; CTNNB1; G34E; 1
YLDSEIHSGAT

SEQ ID NO: 20275 - protein, 11 aa, Homo sapiens
  Table A; HLA-B*27:02; CTNNB1; G34E; 0
YLDSEIHSGAT

SEQ ID NO: 20276 - protein, 11 aa, Homo sapiens
  Table A; HLA-B*39:01; CTNNB1; G34E; 0
YLDSEIHSGAT

SEQ ID NO: 20277 - protein, 11 aa, Homo sapiens
  Table A; HLA-B*48:01; CTNNB1; G34E; 0
YLDSEIHSGAT

SEQ ID NO: 20278 - protein, 11 aa, Homo sapiens
  Table A; HLA-C*08:03; CTNNB1; G34E; 0
YLDSEIHSGAT

SEQ ID NO: 20279 - protein, 8 aa, Homo sapiens
  Table A; HLA-A*01:01; CTNNB1; S37A; 1
YLDSGIHA

SEQ ID NO: 20280 - protein, 8 aa, Homo sapiens
  Table A; HLA-A*02:01; CTNNB1; S37A; 1
YLDSGIHA

SEQ ID NO: 20281 - protein, 8 aa, Homo sapiens
  Table A; HLA-A*02:03; CTNNB1; S37A; 0
YLDSGIHA

SEQ ID NO: 20282 - protein, 8 aa, Homo sapiens
  Table A; HLA-A*02:07; CTNNB1; S37A; 0
YLDSGIHA

SEQ ID NO: 20283 - protein, 8 aa, Homo sapiens
  Table A; HLA-B*13:02; CTNNB1; S37A; 0
YLDSGIHA

SEQ ID NO: 20284 - protein, 8 aa, Homo sapiens
  Table A; HLA-B*35:03; CTNNB1; S37A; 0
YLDSGIHA

SEQ ID NO: 20285 - protein, 8 aa, Homo sapiens
  Table A; HLA-B*35:12; CTNNB1; S37A; 0
YLDSGIHA

SEQ ID NO: 20286 - protein, 8 aa, Homo sapiens
  Table A; HLA-B*38:01; CTNNB1; S37A; 0
YLDSGIHA

SEQ ID NO: 20287 - protein, 8 aa, Homo sapiens
  Table A; HLA-B*39:01; CTNNB1; S37A; 0
YLDSGIHA

SEQ ID NO: 20288 - protein, 8 aa, Homo sapiens
  Table A; HLA-B*58:01; CTNNB1; S37A; 0
YLDSGIHA

SEQ ID NO: 20289 - protein, 8 aa, Homo sapiens
  Table A; HLA-C*04:01; CTNNB1; S37A; 1
YLDSGIHA

SEQ ID NO: 20290 - protein, 8 aa, Homo sapiens
  Table A; HLA-C*05:01; CTNNB1; S37A; 1
YLDSGIHA

SEQ ID NO: 20291 - protein, 8 aa, Homo sapiens
  Table A; HLA-C*08:01; CTNNB1; S37A; 0
YLDSGIHA

SEQ ID NO: 20292 - protein, 8 aa, Homo sapiens
  Table A; HLA-C*08:02; CTNNB1; S37A; 0
YLDSGIHA

SEQ ID NO: 20293 - protein, 8 aa, Homo sapiens
  Table A; HLA-C*08:03; CTNNB1; S37A; 0
YLDSGIHA

SEQ ID NO: 20294 - protein, 9 aa, Homo sapiens
  Table A; HLA-A*01:01; CTNNB1; S37A; 1
YLDSGIHAG

SEQ ID NO: 20295 - protein, 9 aa, Homo sapiens
  Table A; HLA-A*02:01; CTNNB1; S37A; 1
YLDSGIHAG

SEQ ID NO: 20296 - protein, 9 aa, Homo sapiens
  Table A; HLA-A*02:03; CTNNB1; S37A; 0
YLDSGIHAG

SEQ ID NO: 20297 - protein, 9 aa, Homo sapiens
  Table A; HLA-A*02:04; CTNNB1; S37A; 0
YLDSGIHAG

SEQ ID NO: 20298 - protein, 9 aa, Homo sapiens
  Table A; HLA-A*02:06; CTNNB1; S37A; 0
YLDSGIHAG

SEQ ID NO: 20299 - protein, 9 aa, Homo sapiens
  Table A; HLA-A*02:07; CTNNB1; S37A; 0
YLDSGIHAG

SEQ ID NO: 20300 - protein, 9 aa, Homo sapiens
  Table A; HLA-A*31:01; CTNNB1; S37A; 0
YLDSGIHAG

SEQ ID NO: 20301 - protein, 9 aa, Homo sapiens
  Table A; HLA-A*68:02; CTNNB1; S37A; 0
YLDSGIHAG

SEQ ID NO: 20302 - protein, 9 aa, Homo sapiens
  Table A; HLA-B*08:01; CTNNB1; S37A; 1
YLDSGIHAG

SEQ ID NO: 20303 - protein, 9 aa, Homo sapiens
  Table A; HLA-B*13:02; CTNNB1; S37A; 0
YLDSGIHAG

SEQ ID NO: 20304 - protein, 9 aa, Homo sapiens
  Table A; HLA-B*39:01; CTNNB1; S37A; 0
YLDSGIHAG

SEQ ID NO: 20305 - protein, 9 aa, Homo sapiens
  Table A; HLA-B*48:01; CTNNB1; S37A; 0
YLDSGIHAG

SEQ ID NO: 20306 - protein, 9 aa, Homo sapiens
  Table A; HLA-C*08:02; CTNNB1; S37A; 0
YLDSGIHAG

SEQ ID NO: 20307 - protein, 10 aa, Homo sapiens
  Table A; HLA-A*01:01; CTNNB1; S37A; 1
YLDSGIHAGA

SEQ ID NO: 20308 - protein, 10 aa, Homo sapiens
  Table A; HLA-A*02:01; CTNNB1; S37A; 1
YLDSGIHAGA

SEQ ID NO: 20309 - protein, 10 aa, Homo sapiens
  Table A; HLA-A*02:03; CTNNB1; S37A; 0
YLDSGIHAGA

SEQ ID NO: 20310 - protein, 10 aa, Homo sapiens
  Table A; HLA-A*02:04; CTNNB1; S37A; 0
YLDSGIHAGA

SEQ ID NO: 20311 - protein, 10 aa, Homo sapiens
  Table A; HLA-A*02:05; CTNNB1; S37A; 0
YLDSGIHAGA

SEQ ID NO: 20312 - protein, 10 aa, Homo sapiens
  Table A; HLA-A*02:06; CTNNB1; S37A; 0
YLDSGIHAGA

SEQ ID NO: 20313 - protein, 10 aa, Homo sapiens
  Table A; HLA-A*02:07; CTNNB1; S37A; 0
YLDSGIHAGA

SEQ ID NO: 20314 - protein, 10 aa, Homo sapiens
  Table A; HLA-A*02:08; CTNNB1; S37A; 0
YLDSGIHAGA

SEQ ID NO: 20315 - protein, 10 aa, Homo sapiens
  Table A; HLA-A*03:01; CTNNB1; S37A; 1
YLDSGIHAGA

SEQ ID NO: 20316 - protein, 10 aa, Homo sapiens
  Table A; HLA-A*03:02; CTNNB1; S37A; 0
YLDSGIHAGA

SEQ ID NO: 20317 - protein, 10 aa, Homo sapiens
  Table A; HLA-A*11:01; CTNNB1; S37A; 1
YLDSGIHAGA

SEQ ID NO: 20318 - protein, 10 aa, Homo sapiens
  Table A; HLA-A*26:03; CTNNB1; S37A; 0
YLDSGIHAGA

SEQ ID NO: 20319 - protein, 10 aa, Homo sapiens
  Table A; HLA-A*29:02; CTNNB1; S37A; 0
YLDSGIHAGA

SEQ ID NO: 20320 - protein, 10 aa, Homo sapiens
  Table A; HLA-A*31:01; CTNNB1; S37A; 0
YLDSGIHAGA

SEQ ID NO: 20321 - protein, 10 aa, Homo sapiens
  Table A; HLA-A*68:01; CTNNB1; S37A; 0
YLDSGIHAGA

SEQ ID NO: 20322 - protein, 10 aa, Homo sapiens
  Table A; HLA-A*68:02; CTNNB1; S37A; 0
YLDSGIHAGA

SEQ ID NO: 20323 - protein, 10 aa, Homo sapiens
  Table A; HLA-B*08:01; CTNNB1; S37A; 1
YLDSGIHAGA

SEQ ID NO: 20324 - protein, 10 aa, Homo sapiens
  Table A; HLA-B*13:02; CTNNB1; S37A; 0
YLDSGIHAGA

SEQ ID NO: 20325 - protein, 10 aa, Homo sapiens
  Table A; HLA-B*27:02; CTNNB1; S37A; 0
YLDSGIHAGA

SEQ ID NO: 20326 - protein, 10 aa, Homo sapiens
  Table A; HLA-B*27:05; CTNNB1; S37A; 0
YLDSGIHAGA

SEQ ID NO: 20327 - protein, 10 aa, Homo sapiens
  Table A; HLA-B*39:01; CTNNB1; S37A; 0
YLDSGIHAGA

SEQ ID NO: 20328 - protein, 10 aa, Homo sapiens
  Table A; HLA-B*39:06; CTNNB1; S37A; 0
YLDSGIHAGA

SEQ ID NO: 20329 - protein, 10 aa, Homo sapiens
  Table A; HLA-B*40:02; CTNNB1; S37A; 0
YLDSGIHAGA

SEQ ID NO: 20330 - protein, 10 aa, Homo sapiens
  Table A; HLA-B*48:01; CTNNB1; S37A; 0
YLDSGIHAGA

SEQ ID NO: 20331 - protein, 10 aa, Homo sapiens
  Table A; HLA-B*50:01; CTNNB1; S37A; 0
YLDSGIHAGA

SEQ ID NO: 20332 - protein, 10 aa, Homo sapiens
  Table A; HLA-B*54:01; CTNNB1; S37A; 0
YLDSGIHAGA

SEQ ID NO: 20333 - protein, 10 aa, Homo sapiens
  Table A; HLA-C*08:01; CTNNB1; S37A; 0
YLDSGIHAGA

SEQ ID NO: 20334 - protein, 10 aa, Homo sapiens
  Table A; HLA-C*08:02; CTNNB1; S37A; 0
YLDSGIHAGA

SEQ ID NO: 20335 - protein, 10 aa, Homo sapiens
  Table A; HLA-C*08:03; CTNNB1; S37A; 0
YLDSGIHAGA

SEQ ID NO: 20336 - protein, 11 aa, Homo sapiens
  Table A; HLA-A*01:01; CTNNB1; S37A; 1
YLDSGIHAGAT

SEQ ID NO: 20337 - protein, 11 aa, Homo sapiens
  Table A; HLA-A*02:01; CTNNB1; S37A; 1
YLDSGIHAGAT

SEQ ID NO: 20338 - protein, 11 aa, Homo sapiens
  Table A; HLA-B*27:02; CTNNB1; S37A; 0
YLDSGIHAGAT

SEQ ID NO: 20339 - protein, 11 aa, Homo sapiens
  Table A; HLA-B*48:01; CTNNB1; S37A; 0
YLDSGIHAGAT

SEQ ID NO: 20340 - protein, 11 aa, Homo sapiens
  Table A; HLA-C*08:03; CTNNB1; S37A; 0
YLDSGIHAGAT

SEQ ID NO: 20341 - protein, 8 aa, Homo sapiens
  Table A; HLA-A*02:01; CTNNB1; S37C; 1
YLDSGIHC

SEQ ID NO: 20342 - protein, 8 aa, Homo sapiens
  Table A; HLA-A*02:07; CTNNB1; S37C; 0
YLDSGIHC

SEQ ID NO: 20343 - protein, 8 aa, Homo sapiens
  Table A; HLA-B*39:01; CTNNB1; S37C; 0
YLDSGIHC

SEQ ID NO: 20344 - protein, 8 aa, Homo sapiens
  Table A; HLA-B*48:01; CTNNB1; S37C; 0
YLDSGIHC

SEQ ID NO: 20345 - protein, 8 aa, Homo sapiens
  Table A; HLA-C*05:01; CTNNB1; S37C; 1
YLDSGIHC

SEQ ID NO: 20346 - protein, 8 aa, Homo sapiens
  Table A; HLA-C*08:01; CTNNB1; S37C; 0
YLDSGIHC

SEQ ID NO: 20347 - protein, 8 aa, Homo sapiens
  Table A; HLA-C*08:02; CTNNB1; S37C; 1
YLDSGIHC

SEQ ID NO: 20348 - protein, 9 aa, Homo sapiens
  Table A; HLA-A*02:01; CTNNB1; S37C; 1
YLDSGIHCG

SEQ ID NO: 20349 - protein, 9 aa, Homo sapiens
  Table A; HLA-A*02:03; CTNNB1; S37C; 0
YLDSGIHCG

SEQ ID NO: 20350 - protein, 9 aa, Homo sapiens
  Table A; HLA-A*02:04; CTNNB1; S37C; 0
YLDSGIHCG

SEQ ID NO: 20351 - protein, 9 aa, Homo sapiens
  Table A; HLA-A*02:06; CTNNB1; S37C; 0
YLDSGIHCG

SEQ ID NO: 20352 - protein, 9 aa, Homo sapiens
  Table A; HLA-A*02:07; CTNNB1; S37C; 0
YLDSGIHCG

SEQ ID NO: 20353 - protein, 9 aa, Homo sapiens
  Table A; HLA-A*31:01; CTNNB1; S37C; 1
YLDSGIHCG

SEQ ID NO: 20354 - protein, 9 aa, Homo sapiens
  Table A; HLA-A*68:02; CTNNB1; S37C; 0
YLDSGIHCG

SEQ ID NO: 20355 - protein, 9 aa, Homo sapiens
  Table A; HLA-B*08:01; CTNNB1; S37C; 1
YLDSGIHCG

SEQ ID NO: 20356 - protein, 9 aa, Homo sapiens
  Table A; HLA-B*13:02; CTNNB1; S37C; 1
YLDSGIHCG

SEQ ID NO: 20357 - protein, 9 aa, Homo sapiens
  Table A; HLA-B*38:01; CTNNB1; S37C; 1
YLDSGIHCG

SEQ ID NO: 20358 - protein, 9 aa, Homo sapiens
  Table A; HLA-B*39:01; CTNNB1; S37C; 0
YLDSGIHCG

SEQ ID NO: 20359 - protein, 9 aa, Homo sapiens
  Table A; HLA-B*48:01; CTNNB1; S37C; 0
YLDSGIHCG

SEQ ID NO: 20360 - protein, 10 aa, Homo sapiens
  Table A; HLA-A*01:01; CTNNB1; S37C; 1
YLDSGIHCGA

SEQ ID NO: 20361 - protein, 10 aa, Homo sapiens
  Table A; HLA-A*02:01; CTNNB1; S37C; 1
YLDSGIHCGA

SEQ ID NO: 20362 - protein, 10 aa, Homo sapiens
  Table A; HLA-A*02:03; CTNNB1; S37C; 0
YLDSGIHCGA

SEQ ID NO: 20363 - protein, 10 aa, Homo sapiens
  Table A; HLA-A*02:04; CTNNB1; S37C; 0
YLDSGIHCGA

SEQ ID NO: 20364 - protein, 10 aa, Homo sapiens
  Table A; HLA-A*02:05; CTNNB1; S37C; 0
YLDSGIHCGA

SEQ ID NO: 20365 - protein, 10 aa, Homo sapiens
  Table A; HLA-A*02:06; CTNNB1; S37C; 0
YLDSGIHCGA

SEQ ID NO: 20366 - protein, 10 aa, Homo sapiens
  Table A; HLA-A*02:07; CTNNB1; S37C; 0
YLDSGIHCGA

SEQ ID NO: 20367 - protein, 10 aa, Homo sapiens
  Table A; HLA-A*03:01; CTNNB1; S37C; 1
YLDSGIHCGA

SEQ ID NO: 20368 - protein, 10 aa, Homo sapiens
  Table A; HLA-A*03:02; CTNNB1; S37C; 0
YLDSGIHCGA

SEQ ID NO: 20369 - protein, 10 aa, Homo sapiens
  Table A; HLA-A*68:02; CTNNB1; S37C; 0
YLDSGIHCGA

SEQ ID NO: 20370 - protein, 10 aa, Homo sapiens
  Table A; HLA-B*13:02; CTNNB1; S37C; 1
YLDSGIHCGA

SEQ ID NO: 20371 - protein, 10 aa, Homo sapiens
  Table A; HLA-B*39:06; CTNNB1; S37C; 0
YLDSGIHCGA

SEQ ID NO: 20372 - protein, 10 aa, Homo sapiens
  Table A; HLA-B*48:01; CTNNB1; S37C; 0
YLDSGIHCGA

SEQ ID NO: 20373 - protein, 10 aa, Homo sapiens
  Table A; HLA-B*50:01; CTNNB1; S37C; 0
YLDSGIHCGA

SEQ ID NO: 20374 - protein, 10 aa, Homo sapiens
  Table A; HLA-B*54:01; CTNNB1; S37C; 0
YLDSGIHCGA

SEQ ID NO: 20375 - protein, 10 aa, Homo sapiens
  Table A; HLA-C*08:03; CTNNB1; S37C; 0
YLDSGIHCGA

SEQ ID NO: 20376 - protein, 8 aa, Homo sapiens
  Table A; HLA-A*01:01; CTNNB1; S37F; 1
YLDSGIHF

SEQ ID NO: 20377 - protein, 8 aa, Homo sapiens
  Table A; HLA-A*02:01; CTNNB1; S37F; 1
YLDSGIHF

SEQ ID NO: 20378 - protein, 8 aa, Homo sapiens
  Table A; HLA-A*02:04; CTNNB1; S37F; 0
YLDSGIHF

SEQ ID NO: 20379 - protein, 8 aa, Homo sapiens
  Table A; HLA-A*02:07; CTNNB1; S37F; 0
YLDSGIHF

SEQ ID NO: 20380 - protein, 8 aa, Homo sapiens
  Table A; HLA-A*11:01; CTNNB1; S37F; 1
YLDSGIHF

SEQ ID NO: 20381 - protein, 8 aa, Homo sapiens
  Table A; HLA-A*23:01; CTNNB1; S37F; 1
YLDSGIHF

SEQ ID NO: 20382 - protein, 8 aa, Homo sapiens
  Table A; HLA-B*08:01; CTNNB1; S37F; 1
YLDSGIHF

SEQ ID NO: 20383 - protein, 8 aa, Homo sapiens
  Table A; HLA-B*13:01; CTNNB1; S37F; 0
YLDSGIHF

SEQ ID NO: 20384 - protein, 8 aa, Homo sapiens
  Table A; HLA-B*15:01; CTNNB1; S37F; 1
YLDSGIHF

SEQ ID NO: 20385 - protein, 8 aa, Homo sapiens
  Table A; HLA-B*15:13; CTNNB1; S37F; 0
YLDSGIHF

SEQ ID NO: 20386 - protein, 8 aa, Homo sapiens
  Table A; HLA-B*35:01; CTNNB1; S37F; 1
YLDSGIHF

SEQ ID NO: 20387 - protein, 8 aa, Homo sapiens
  Table A; HLA-B*35:03; CTNNB1; S37F; 0
YLDSGIHF

SEQ ID NO: 20388 - protein, 8 aa, Homo sapiens
  Table A; HLA-B*35:08; CTNNB1; S37F; 0
YLDSGIHF

SEQ ID NO: 20389 - protein, 8 aa, Homo sapiens
  Table A; HLA-B*37:01; CTNNB1; S37F; 0
YLDSGIHF

SEQ ID NO: 20390 - protein, 8 aa, Homo sapiens
  Table A; HLA-B*38:01; CTNNB1; S37F; 1
YLDSGIHF

SEQ ID NO: 20391 - protein, 8 aa, Homo sapiens
  Table A; HLA-B*39:01; CTNNB1; S37F; 0
YLDSGIHF

SEQ ID NO: 20392 - protein, 8 aa, Homo sapiens
  Table A; HLA-B*44:05; CTNNB1; S37F; 0
YLDSGIHF

SEQ ID NO: 20393 - protein, 8 aa, Homo sapiens
  Table A; HLA-B*58:01; CTNNB1; S37F; 0
YLDSGIHF

SEQ ID NO: 20394 - protein, 8 aa, Homo sapiens
  Table A; HLA-C*02:02; CTNNB1; S37F; 1
YLDSGIHF

SEQ ID NO: 20395 - protein, 8 aa, Homo sapiens
  Table A; HLA-C*03:02; CTNNB1; S37F; 0
YLDSGIHF

SEQ ID NO: 20396 - protein, 8 aa, Homo sapiens
  Table A; HLA-C*03:03; CTNNB1; S37F; 1
YLDSGIHF

SEQ ID NO: 20397 - protein, 8 aa, Homo sapiens
  Table A; HLA-C*03:04; CTNNB1; S37F; 1
YLDSGIHF

SEQ ID NO: 20398 - protein, 8 aa, Homo sapiens
  Table A; HLA-C*04:01; CTNNB1; S37F; 1
YLDSGIHF

SEQ ID NO: 20399 - protein, 8 aa, Homo sapiens
  Table A; HLA-C*05:01; CTNNB1; S37F; 1
YLDSGIHF

SEQ ID NO: 20400 - protein, 8 aa, Homo sapiens
  Table A; HLA-C*08:01; CTNNB1; S37F; 0
YLDSGIHF

SEQ ID NO: 20401 - protein, 8 aa, Homo sapiens
  Table A; HLA-C*08:02; CTNNB1; S37F; 1
YLDSGIHF

SEQ ID NO: 20402 - protein, 8 aa, Homo sapiens
  Table A; HLA-C*15:02; CTNNB1; S37F; 1
YLDSGIHF

SEQ ID NO: 20403 - protein, 8 aa, Homo sapiens
  Table A; HLA-C*16:01; CTNNB1; S37F; 1
YLDSGIHF

SEQ ID NO: 20404 - protein, 8 aa, Homo sapiens
  Table A; HLA-C*17:01; CTNNB1; S37F; 0
YLDSGIHF

SEQ ID NO: 20405 - protein, 9 aa, Homo sapiens
  Table A; HLA-A*01:01; CTNNB1; S37F; 1
YLDSGIHFG

SEQ ID NO: 20406 - protein, 9 aa, Homo sapiens
  Table A; HLA-A*02:01; CTNNB1; S37F; 1
YLDSGIHFG

SEQ ID NO: 20407 - protein, 9 aa, Homo sapiens
  Table A; HLA-A*02:04; CTNNB1; S37F; 0
YLDSGIHFG

SEQ ID NO: 20408 - protein, 9 aa, Homo sapiens
  Table A; HLA-A*02:07; CTNNB1; S37F; 0
YLDSGIHFG

SEQ ID NO: 20409 - protein, 9 aa, Homo sapiens
  Table A; HLA-A*68:02; CTNNB1; S37F; 0
YLDSGIHFG

SEQ ID NO: 20410 - protein, 10 aa, Homo sapiens
  Table A; HLA-A*01:01; CTNNB1; S37F; 1
YLDSGIHFGA

SEQ ID NO: 20411 - protein, 10 aa, Homo sapiens
  Table A; HLA-A*02:01; CTNNB1; S37F; 1
YLDSGIHFGA

SEQ ID NO: 20412 - protein, 10 aa, Homo sapiens
  Table A; HLA-A*02:03; CTNNB1; S37F; 0
YLDSGIHFGA

SEQ ID NO: 20413 - protein, 10 aa, Homo sapiens
  Table A; HLA-A*02:04; CTNNB1; S37F; 0
YLDSGIHFGA

SEQ ID NO: 20414 - protein, 10 aa, Homo sapiens
  Table A; HLA-A*02:05; CTNNB1; S37F; 0
YLDSGIHFGA

SEQ ID NO: 20415 - protein, 10 aa, Homo sapiens
  Table A; HLA-A*02:06; CTNNB1; S37F; 0
YLDSGIHFGA

SEQ ID NO: 20416 - protein, 10 aa, Homo sapiens
  Table A; HLA-A*02:07; CTNNB1; S37F; 0
YLDSGIHFGA

SEQ ID NO: 20417 - protein, 10 aa, Homo sapiens
  Table A; HLA-A*03:01; CTNNB1; S37F; 1
YLDSGIHFGA

SEQ ID NO: 20418 - protein, 10 aa, Homo sapiens
  Table A; HLA-A*03:02; CTNNB1; S37F; 0
YLDSGIHFGA

SEQ ID NO: 20419 - protein, 10 aa, Homo sapiens
  Table A; HLA-A*29:02; CTNNB1; S37F; 1
YLDSGIHFGA

SEQ ID NO: 20420 - protein, 10 aa, Homo sapiens
  Table A; HLA-A*31:01; CTNNB1; S37F; 1
YLDSGIHFGA

SEQ ID NO: 20421 - protein, 10 aa, Homo sapiens
  Table A; HLA-A*68:02; CTNNB1; S37F; 0
YLDSGIHFGA

SEQ ID NO: 20422 - protein, 10 aa, Homo sapiens
  Table A; HLA-B*08:01; CTNNB1; S37F; 1
YLDSGIHFGA

SEQ ID NO: 20423 - protein, 10 aa, Homo sapiens
  Table A; HLA-B*13:02; CTNNB1; S37F; 1
YLDSGIHFGA

SEQ ID NO: 20424 - protein, 10 aa, Homo sapiens
  Table A; HLA-B*27:02; CTNNB1; S37F; 0
YLDSGIHFGA

SEQ ID NO: 20425 - protein, 10 aa, Homo sapiens
  Table A; HLA-B*48:01; CTNNB1; S37F; 0
YLDSGIHFGA

SEQ ID NO: 20426 - protein, 10 aa, Homo sapiens
  Table A; HLA-B*50:01; CTNNB1; S37F; 0
YLDSGIHFGA

SEQ ID NO: 20427 - protein, 10 aa, Homo sapiens
  Table A; HLA-B*54:01; CTNNB1; S37F; 0
YLDSGIHFGA

SEQ ID NO: 20428 - protein, 11 aa, Homo sapiens
  Table A; HLA-A*02:07; CTNNB1; S37F; 0
YLDSGIHFGAT

SEQ ID NO: 20429 - protein, 11 aa, Homo sapiens
  Table A; HLA-A*68:02; CTNNB1; S37F; 0
YLDSGIHFGAT

SEQ ID NO: 20430 - protein, 8 aa, Homo sapiens
  Table A; HLA-C*08:03; CTNNB1; S37P; 0
YLDSGIHP

SEQ ID NO: 20431 - protein, 9 aa, Homo sapiens
  Table A; HLA-A*01:01; CTNNB1; S37P; 1
YLDSGIHPG

SEQ ID NO: 20432 - protein, 9 aa, Homo sapiens
  Table A; HLA-A*02:01; CTNNB1; S37P; 1
YLDSGIHPG

SEQ ID NO: 20433 - protein, 9 aa, Homo sapiens
  Table A; HLA-A*02:03; CTNNB1; S37P; 0
YLDSGIHPG

SEQ ID NO: 20434 - protein, 9 aa, Homo sapiens
  Table A; HLA-A*02:04; CTNNB1; S37P; 0
YLDSGIHPG

SEQ ID NO: 20435 - protein, 9 aa, Homo sapiens
  Table A; HLA-A*02:06; CTNNB1; S37P; 0
YLDSGIHPG

SEQ ID NO: 20436 - protein, 9 aa, Homo sapiens
  Table A; HLA-A*02:07; CTNNB1; S37P; 0
YLDSGIHPG

SEQ ID NO: 20437 - protein, 9 aa, Homo sapiens
  Table A; HLA-A*31:01; CTNNB1; S37P; 0
YLDSGIHPG

SEQ ID NO: 20438 - protein, 9 aa, Homo sapiens
  Table A; HLA-A*68:02; CTNNB1; S37P; 0
YLDSGIHPG

SEQ ID NO: 20439 - protein, 9 aa, Homo sapiens
  Table A; HLA-B*08:01; CTNNB1; S37P; 1
YLDSGIHPG

SEQ ID NO: 20440 - protein, 9 aa, Homo sapiens
  Table A; HLA-B*39:01; CTNNB1; S37P; 0
YLDSGIHPG

SEQ ID NO: 20441 - protein, 9 aa, Homo sapiens
  Table A; HLA-B*48:01; CTNNB1; S37P; 0
YLDSGIHPG

SEQ ID NO: 20442 - protein, 9 aa, Homo sapiens
  Table A; HLA-B*54:01; CTNNB1; S37P; 0
YLDSGIHPG

SEQ ID NO: 20443 - protein, 9 aa, Homo sapiens
  Table A; HLA-C*08:02; CTNNB1; S37P; 0
YLDSGIHPG

SEQ ID NO: 20444 - protein, 10 aa, Homo sapiens
  Table A; HLA-A*01:01; CTNNB1; S37P; 1
YLDSGIHPGA

SEQ ID NO: 20445 - protein, 10 aa, Homo sapiens
  Table A; HLA-A*02:01; CTNNB1; S37P; 1
YLDSGIHPGA

SEQ ID NO: 20446 - protein, 10 aa, Homo sapiens
  Table A; HLA-A*02:03; CTNNB1; S37P; 0
YLDSGIHPGA

SEQ ID NO: 20447 - protein, 10 aa, Homo sapiens
  Table A; HLA-A*02:04; CTNNB1; S37P; 0
YLDSGIHPGA

SEQ ID NO: 20448 - protein, 10 aa, Homo sapiens
  Table A; HLA-A*02:05; CTNNB1; S37P; 0
YLDSGIHPGA

SEQ ID NO: 20449 - protein, 10 aa, Homo sapiens
  Table A; HLA-A*02:06; CTNNB1; S37P; 0
YLDSGIHPGA

SEQ ID NO: 20450 - protein, 10 aa, Homo sapiens
  Table A; HLA-A*02:07; CTNNB1; S37P; 0
YLDSGIHPGA

SEQ ID NO: 20451 - protein, 10 aa, Homo sapiens
  Table A; HLA-A*02:08; CTNNB1; S37P; 0
YLDSGIHPGA

SEQ ID NO: 20452 - protein, 10 aa, Homo sapiens
  Table A; HLA-A*03:01; CTNNB1; S37P; 1
YLDSGIHPGA

SEQ ID NO: 20453 - protein, 10 aa, Homo sapiens
  Table A; HLA-A*03:02; CTNNB1; S37P; 0
YLDSGIHPGA

SEQ ID NO: 20454 - protein, 10 aa, Homo sapiens
  Table A; HLA-A*68:01; CTNNB1; S37P; 0
YLDSGIHPGA

SEQ ID NO: 20455 - protein, 10 aa, Homo sapiens
  Table A; HLA-A*68:02; CTNNB1; S37P; 0
YLDSGIHPGA

SEQ ID NO: 20456 - protein, 10 aa, Homo sapiens
  Table A; HLA-B*08:01; CTNNB1; S37P; 1
YLDSGIHPGA

SEQ ID NO: 20457 - protein, 10 aa, Homo sapiens
  Table A; HLA-B*13:02; CTNNB1; S37P; 0
YLDSGIHPGA

SEQ ID NO: 20458 - protein, 10 aa, Homo sapiens
  Table A; HLA-B*39:01; CTNNB1; S37P; 0
YLDSGIHPGA

SEQ ID NO: 20459 - protein, 10 aa, Homo sapiens
  Table A; HLA-B*39:06; CTNNB1; S37P; 0
YLDSGIHPGA

SEQ ID NO: 20460 - protein, 10 aa, Homo sapiens
  Table A; HLA-B*48:01; CTNNB1; S37P; 0
YLDSGIHPGA

SEQ ID NO: 20461 - protein, 10 aa, Homo sapiens
  Table A; HLA-B*50:01; CTNNB1; S37P; 0
YLDSGIHPGA

SEQ ID NO: 20462 - protein, 10 aa, Homo sapiens
  Table A; HLA-B*54:01; CTNNB1; S37P; 0
YLDSGIHPGA

SEQ ID NO: 20463 - protein, 10 aa, Homo sapiens
  Table A; HLA-C*08:01; CTNNB1; S37P; 0
YLDSGIHPGA

SEQ ID NO: 20464 - protein, 10 aa, Homo sapiens
  Table A; HLA-C*08:02; CTNNB1; S37P; 0
YLDSGIHPGA

SEQ ID NO: 20465 - protein, 11 aa, Homo sapiens
  Table A; HLA-A*01:01; CTNNB1; S37P; 1
YLDSGIHPGAT

SEQ ID NO: 20466 - protein, 11 aa, Homo sapiens
  Table A; HLA-A*02:01; CTNNB1; S37P; 1
YLDSGIHPGAT

SEQ ID NO: 20467 - protein, 11 aa, Homo sapiens
  Table A; HLA-B*39:01; CTNNB1; S37P; 0
YLDSGIHPGAT

SEQ ID NO: 20468 - protein, 11 aa, Homo sapiens
  Table A; HLA-B*48:01; CTNNB1; S37P; 0
YLDSGIHPGAT

SEQ ID NO: 20469 - protein, 9 aa, Homo sapiens
  Table A; HLA-A*02:01; CTNNB1; G34R; 1
YLDSRIHSG

SEQ ID NO: 20470 - protein, 9 aa, Homo sapiens
  Table A; HLA-A*02:04; CTNNB1; G34R; 0
YLDSRIHSG

SEQ ID NO: 20471 - protein, 9 aa, Homo sapiens
  Table A; HLA-A*02:07; CTNNB1; G34R; 0
YLDSRIHSG

SEQ ID NO: 20472 - protein, 9 aa, Homo sapiens
  Table A; HLA-B*08:01; CTNNB1; G34R; 1
YLDSRIHSG

SEQ ID NO: 20473 - protein, 10 aa, Homo sapiens
  Table A; HLA-A*02:01; CTNNB1; G34R; 1
YLDSRIHSGA

SEQ ID NO: 20474 - protein, 10 aa, Homo sapiens
  Table A; HLA-A*02:03; CTNNB1; G34R; 0
YLDSRIHSGA

SEQ ID NO: 20475 - protein, 10 aa, Homo sapiens
  Table A; HLA-A*02:07; CTNNB1; G34R; 0
YLDSRIHSGA

SEQ ID NO: 20476 - protein, 10 aa, Homo sapiens
  Table A; HLA-A*03:01; CTNNB1; G34R; 1
YLDSRIHSGA

SEQ ID NO: 20477 - protein, 10 aa, Homo sapiens
  Table A; HLA-A*31:01; CTNNB1; G34R; 1
YLDSRIHSGA

SEQ ID NO: 20478 - protein, 10 aa, Homo sapiens
  Table A; HLA-B*48:01; CTNNB1; G34R; 0
YLDSRIHSGA

SEQ ID NO: 20479 - protein, 11 aa, Homo sapiens
  Table A; HLA-B*08:01; CTNNB1; G34R; 1
YLDSRIHSGAT

SEQ ID NO: 20480 - protein, 9 aa, Homo sapiens
  Table A; HLA-A*01:01; CTNNB1; G34V; 1
YLDSVIHSG

SEQ ID NO: 20481 - protein, 9 aa, Homo sapiens
  Table A; HLA-A*02:01; CTNNB1; G34V; 1
YLDSVIHSG

SEQ ID NO: 20482 - protein, 9 aa, Homo sapiens
  Table A; HLA-A*02:04; CTNNB1; G34V; 0
YLDSVIHSG

SEQ ID NO: 20483 - protein, 9 aa, Homo sapiens
  Table A; HLA-A*02:06; CTNNB1; G34V; 0
YLDSVIHSG

SEQ ID NO: 20484 - protein, 9 aa, Homo sapiens
  Table A; HLA-A*02:07; CTNNB1; G34V; 0
YLDSVIHSG

SEQ ID NO: 20485 - protein, 9 aa, Homo sapiens
  Table A; HLA-A*31:01; CTNNB1; G34V; 0
YLDSVIHSG

SEQ ID NO: 20486 - protein, 9 aa, Homo sapiens
  Table A; HLA-A*68:02; CTNNB1; G34V; 0
YLDSVIHSG

SEQ ID NO: 20487 - protein, 9 aa, Homo sapiens
  Table A; HLA-B*13:02; CTNNB1; G34V; 0
YLDSVIHSG

SEQ ID NO: 20488 - protein, 9 aa, Homo sapiens
  Table A; HLA-C*08:02; CTNNB1; G34V; 1
YLDSVIHSG

SEQ ID NO: 20489 - protein, 10 aa, Homo sapiens
  Table A; HLA-A*01:01; CTNNB1; G34V; 1
YLDSVIHSGA

SEQ ID NO: 20490 - protein, 10 aa, Homo sapiens
  Table A; HLA-A*02:01; CTNNB1; G34V; 1
YLDSVIHSGA

SEQ ID NO: 20491 - protein, 10 aa, Homo sapiens
  Table A; HLA-A*02:03; CTNNB1; G34V; 0
YLDSVIHSGA

SEQ ID NO: 20492 - protein, 10 aa, Homo sapiens
  Table A; HLA-A*02:05; CTNNB1; G34V; 0
YLDSVIHSGA

SEQ ID NO: 20493 - protein, 10 aa, Homo sapiens
  Table A; HLA-A*02:06; CTNNB1; G34V; 0
YLDSVIHSGA

SEQ ID NO: 20494 - protein, 10 aa, Homo sapiens
  Table A; HLA-A*02:07; CTNNB1; G34V; 0
YLDSVIHSGA

SEQ ID NO: 20495 - protein, 10 aa, Homo sapiens
  Table A; HLA-A*03:01; CTNNB1; G34V; 1
YLDSVIHSGA

SEQ ID NO: 20496 - protein, 10 aa, Homo sapiens
  Table A; HLA-A*03:02; CTNNB1; G34V; 0
YLDSVIHSGA

SEQ ID NO: 20497 - protein, 10 aa, Homo sapiens
  Table A; HLA-A*68:02; CTNNB1; G34V; 0
YLDSVIHSGA

SEQ ID NO: 20498 - protein, 10 aa, Homo sapiens
  Table A; HLA-B*27:02; CTNNB1; G34V; 0
YLDSVIHSGA

SEQ ID NO: 20499 - protein, 10 aa, Homo sapiens
  Table A; HLA-B*48:01; CTNNB1; G34V; 0
YLDSVIHSGA

SEQ ID NO: 20500 - protein, 10 aa, Homo sapiens
  Table A; HLA-B*54:01; CTNNB1; G34V; 0
YLDSVIHSGA

SEQ ID NO: 20501 - protein, 11 aa, Homo sapiens
  Table A; HLA-A*01:01; CTNNB1; G34V; 1
YLDSVIHSGAT

SEQ ID NO: 20502 - protein, 11 aa, Homo sapiens
  Table A; HLA-A*02:01; CTNNB1; G34V; 1
YLDSVIHSGAT

SEQ ID NO: 20503 - protein, 11 aa, Homo sapiens
  Table A; HLA-A*02:07; CTNNB1; G34V; 0
YLDSVIHSGAT

SEQ ID NO: 20504 - protein, 11 aa, Homo sapiens
  Table A; HLA-A*68:02; CTNNB1; G34V; 0
YLDSVIHSGAT

SEQ ID NO: 20505 - protein, 11 aa, Homo sapiens
  Table A; HLA-B*08:01; CTNNB1; G34V; 1
YLDSVIHSGAT

SEQ ID NO: 20506 - protein, 11 aa, Homo sapiens
  Table A; HLA-B*48:01; CTNNB1; G34V; 0
YLDSVIHSGAT

SEQ ID NO: 20507 - protein, 11 aa, Homo sapiens
  Table A; HLA-C*08:03; CTNNB1; G34V; 0
YLDSVIHSGAT

SEQ ID NO: 20508 - protein, 9 aa, Homo sapiens
  Table A; HLA-A*01:01; CTNNB1; S33Y; 1
YLDYGIHSG

SEQ ID NO: 20509 - protein, 9 aa, Homo sapiens
  Table A; HLA-A*02:01; CTNNB1; S33Y; 1
YLDYGIHSG

SEQ ID NO: 20510 - protein, 9 aa, Homo sapiens
  Table A; HLA-A*02:07; CTNNB1; S33Y; 0
YLDYGIHSG

SEQ ID NO: 20511 - protein, 10 aa, Homo sapiens
  Table A; HLA-A*01:01; CTNNB1; S33Y; 1
YLDYGIHSGA

SEQ ID NO: 20512 - protein, 10 aa, Homo sapiens
  Table A; HLA-A*02:01; CTNNB1; S33Y; 1
YLDYGIHSGA

SEQ ID NO: 20513 - protein, 10 aa, Homo sapiens
  Table A; HLA-A*02:03; CTNNB1; S33Y; 0
YLDYGIHSGA

SEQ ID NO: 20514 - protein, 10 aa, Homo sapiens
  Table A; HLA-A*02:04; CTNNB1; S33Y; 0
YLDYGIHSGA

SEQ ID NO: 20515 - protein, 10 aa, Homo sapiens
  Table A; HLA-A*02:05; CTNNB1; S33Y; 0
YLDYGIHSGA

SEQ ID NO: 20516 - protein, 10 aa, Homo sapiens
  Table A; HLA-A*02:06; CTNNB1; S33Y; 0
YLDYGIHSGA

SEQ ID NO: 20517 - protein, 10 aa, Homo sapiens
  Table A; HLA-A*02:07; CTNNB1; S33Y; 0
YLDYGIHSGA

SEQ ID NO: 20518 - protein, 10 aa, Homo sapiens
  Table A; HLA-A*03:01; CTNNB1; S33Y; 1
YLDYGIHSGA

SEQ ID NO: 20519 - protein, 10 aa, Homo sapiens
  Table A; HLA-A*03:02; CTNNB1; S33Y; 0
YLDYGIHSGA

SEQ ID NO: 20520 - protein, 10 aa, Homo sapiens
  Table A; HLA-A*68:02; CTNNB1; S33Y; 0
YLDYGIHSGA

SEQ ID NO: 20521 - protein, 10 aa, Homo sapiens
  Table A; HLA-B*13:02; CTNNB1; S33Y; 0
YLDYGIHSGA

SEQ ID NO: 20522 - protein, 10 aa, Homo sapiens
  Table A; HLA-B*27:02; CTNNB1; S33Y; 0
YLDYGIHSGA

SEQ ID NO: 20523 - protein, 10 aa, Homo sapiens
  Table A; HLA-B*48:01; CTNNB1; S33Y; 0
YLDYGIHSGA

SEQ ID NO: 20524 - protein, 10 aa, Homo sapiens
  Table A; HLA-B*50:01; CTNNB1; S33Y; 0
YLDYGIHSGA

SEQ ID NO: 20525 - protein, 10 aa, Homo sapiens
  Table A; HLA-B*54:01; CTNNB1; S33Y; 0
YLDYGIHSGA

SEQ ID NO: 20526 - protein, 11 aa, Homo sapiens
  Table A; HLA-A*02:01; CTNNB1; S33Y; 1
YLDYGIHSGAT

SEQ ID NO: 20527 - protein, 11 aa, Homo sapiens
  Table A; HLA-A*02:07; CTNNB1; S33Y; 0
YLDYGIHSGAT

SEQ ID NO: 20528 - protein, 10 aa, Homo sapiens
  Table A; HLA-A*26:03; RAC1; A159V; 0
YLECSVLTQR

SEQ ID NO: 20529 - protein, 10 aa, Homo sapiens
  Table A; HLA-A*68:01; RAC1; A159V; 0
YLECSVLTQR

SEQ ID NO: 20530 - protein, 10 aa, Homo sapiens
  Table A; HLA-B*27:02; RAC1; A159V; 0
YLECSVLTQR

SEQ ID NO: 20531 - protein, 8 aa, Homo sapiens
  Table A; HLA-A*02:03; ERBB2; V842I; 0
YLEDVRLI

SEQ ID NO: 20532 - protein, 8 aa, Homo sapiens
  Table A; HLA-A*02:04; ERBB2; V842I; 0
YLEDVRLI

SEQ ID NO: 20533 - protein, 10 aa, Homo sapiens
  Table A; HLA-A*02:04; ERBB2; V842I; 0
YLEDVRLIHR

SEQ ID NO: 20534 - protein, 10 aa, Homo sapiens
  Table A; HLA-A*02:07; ERBB2; V842I; 0
YLEDVRLIHR

SEQ ID NO: 20535 - protein, 9 aa, Homo sapiens
  Table A; HLA-A*02:04; FGFR2; C382R; 0
YLEIAIYRI

SEQ ID NO: 20536 - protein, 11 aa, Homo sapiens
  Table A; HLA-B*27:02; MAPK1; E322K; 0
YLEQYYDPSDK

SEQ ID NO: 20537 - protein, 9 aa, Homo sapiens
  Table A; HLA-A*02:01; CTNNB1; D32H; 1
YLHSGIHSG

SEQ ID NO: 20538 - protein, 9 aa, Homo sapiens
  Table A; HLA-A*02:03; CTNNB1; D32H; 0
YLHSGIHSG

SEQ ID NO: 20539 - protein, 9 aa, Homo sapiens
  Table A; HLA-A*02:04; CTNNB1; D32H; 0
YLHSGIHSG

SEQ ID NO: 20540 - protein, 9 aa, Homo sapiens
  Table A; HLA-A*02:07; CTNNB1; D32H; 0
YLHSGIHSG

SEQ ID NO: 20541 - protein, 9 aa, Homo sapiens
  Table A; HLA-A*26:03; CTNNB1; D32H; 0
YLHSGIHSG

SEQ ID NO: 20542 - protein, 9 aa, Homo sapiens
  Table A; HLA-A*31:01; CTNNB1; D32H; 0
YLHSGIHSG

SEQ ID NO: 20543 - protein, 9 aa, Homo sapiens
  Table A; HLA-A*33:01; CTNNB1; D32H; 0
YLHSGIHSG

SEQ ID NO: 20544 - protein, 9 aa, Homo sapiens
  Table A; HLA-A*68:02; CTNNB1; D32H; 0
YLHSGIHSG

SEQ ID NO: 20545 - protein, 9 aa, Homo sapiens
  Table A; HLA-B*08:01; CTNNB1; D32H; 1
YLHSGIHSG

SEQ ID NO: 20546 - protein, 9 aa, Homo sapiens
  Table A; HLA-B*13:02; CTNNB1; D32H; 0
YLHSGIHSG

SEQ ID NO: 20547 - protein, 9 aa, Homo sapiens
  Table A; HLA-B*46:01; CTNNB1; D32H; 0
YLHSGIHSG

SEQ ID NO: 20548 - protein, 9 aa, Homo sapiens
  Table A; HLA-B*54:01; CTNNB1; D32H; 0
YLHSGIHSG

SEQ ID NO: 20549 - protein, 10 aa, Homo sapiens
  Table A; HLA-A*02:01; CTNNB1; D32H; 1
YLHSGIHSGA

SEQ ID NO: 20550 - protein, 10 aa, Homo sapiens
  Table A; HLA-A*02:03; CTNNB1; D32H; 0
YLHSGIHSGA

SEQ ID NO: 20551 - protein, 10 aa, Homo sapiens
  Table A; HLA-A*02:04; CTNNB1; D32H; 0
YLHSGIHSGA

SEQ ID NO: 20552 - protein, 10 aa, Homo sapiens
  Table A; HLA-A*02:05; CTNNB1; D32H; 0
YLHSGIHSGA

SEQ ID NO: 20553 - protein, 10 aa, Homo sapiens
  Table A; HLA-A*02:07; CTNNB1; D32H; 0
YLHSGIHSGA

SEQ ID NO: 20554 - protein, 10 aa, Homo sapiens
  Table A; HLA-A*02:08; CTNNB1; D32H; 0
YLHSGIHSGA

SEQ ID NO: 20555 - protein, 10 aa, Homo sapiens
  Table A; HLA-A*03:01; CTNNB1; D32H; 1
YLHSGIHSGA

SEQ ID NO: 20556 - protein, 10 aa, Homo sapiens
  Table A; HLA-A*26:03; CTNNB1; D32H; 0
YLHSGIHSGA

SEQ ID NO: 20557 - protein, 10 aa, Homo sapiens
  Table A; HLA-A*30:01; CTNNB1; D32H; 0
YLHSGIHSGA

SEQ ID NO: 20558 - protein, 10 aa, Homo sapiens
  Table A; HLA-A*31:01; CTNNB1; D32H; 0
YLHSGIHSGA

SEQ ID NO: 20559 - protein, 10 aa, Homo sapiens
  Table A; HLA-A*68:02; CTNNB1; D32H; 0
YLHSGIHSGA

SEQ ID NO: 20560 - protein, 10 aa, Homo sapiens
  Table A; HLA-B*13:02; CTNNB1; D32H; 0
YLHSGIHSGA

SEQ ID NO: 20561 - protein, 10 aa, Homo sapiens
  Table A; HLA-B*15:01; CTNNB1; D32H; 0
YLHSGIHSGA

SEQ ID NO: 20562 - protein, 10 aa, Homo sapiens
  Table A; HLA-B*48:01; CTNNB1; D32H; 0
YLHSGIHSGA

SEQ ID NO: 20563 - protein, 10 aa, Homo sapiens
  Table A; HLA-B*50:01; CTNNB1; D32H; 0
YLHSGIHSGA

SEQ ID NO: 20564 - protein, 10 aa, Homo sapiens
  Table A; HLA-B*54:01; CTNNB1; D32H; 0
YLHSGIHSGA

SEQ ID NO: 20565 - protein, 10 aa, Homo sapiens
  Table A; HLA-C*08:03; CTNNB1; D32H; 0
YLHSGIHSGA

SEQ ID NO: 20566 - protein, 11 aa, Homo sapiens
  Table A; HLA-A*02:01; CTNNB1; D32H; 1
YLHSGIHSGAT

SEQ ID NO: 20567 - protein, 11 aa, Homo sapiens
  Table A; HLA-A*02:03; CTNNB1; D32H; 0
YLHSGIHSGAT

SEQ ID NO: 20568 - protein, 11 aa, Homo sapiens
  Table A; HLA-B*48:01; CTNNB1; D32H; 0
YLHSGIHSGAT

SEQ ID NO: 20569 - protein, 9 aa, Homo sapiens
  Table A; HLA-A*02:03; TP53; H193Y; 0
YLIRVEGNL

SEQ ID NO: 20570 - protein, 9 aa, Homo sapiens
  Table A; HLA-A*02:04; TP53; H193Y; 0
YLIRVEGNL

SEQ ID NO: 20571 - protein, 9 aa, Homo sapiens
  Table A; HLA-A*02:01; CTNNB1; D32N; 1
YLNSGIHSG

SEQ ID NO: 20572 - protein, 9 aa, Homo sapiens
  Table A; HLA-A*02:03; CTNNB1; D32N; 0
YLNSGIHSG

SEQ ID NO: 20573 - protein, 9 aa, Homo sapiens
  Table A; HLA-A*02:04; CTNNB1; D32N; 0
YLNSGIHSG

SEQ ID NO: 20574 - protein, 9 aa, Homo sapiens
  Table A; HLA-A*02:07; CTNNB1; D32N; 0
YLNSGIHSG

SEQ ID NO: 20575 - protein, 9 aa, Homo sapiens
  Table A; HLA-A*03:01; CTNNB1; D32N; 1
YLNSGIHSG

SEQ ID NO: 20576 - protein, 9 aa, Homo sapiens
  Table A; HLA-A*03:02; CTNNB1; D32N; 0
YLNSGIHSG

SEQ ID NO: 20577 - protein, 9 aa, Homo sapiens
  Table A; HLA-A*26:01; CTNNB1; D32N; 1
YLNSGIHSG

SEQ ID NO: 20578 - protein, 9 aa, Homo sapiens
  Table A; HLA-A*31:01; CTNNB1; D32N; 1
YLNSGIHSG

SEQ ID NO: 20579 - protein, 9 aa, Homo sapiens
  Table A; HLA-A*33:01; CTNNB1; D32N; 0
YLNSGIHSG

SEQ ID NO: 20580 - protein, 9 aa, Homo sapiens
  Table A; HLA-A*33:03; CTNNB1; D32N; 0
YLNSGIHSG

SEQ ID NO: 20581 - protein, 9 aa, Homo sapiens
  Table A; HLA-A*68:02; CTNNB1; D32N; 0
YLNSGIHSG

SEQ ID NO: 20582 - protein, 9 aa, Homo sapiens
  Table A; HLA-B*08:01; CTNNB1; D32N; 1
YLNSGIHSG

SEQ ID NO: 20583 - protein, 9 aa, Homo sapiens
  Table A; HLA-B*13:02; CTNNB1; D32N; 1
YLNSGIHSG

SEQ ID NO: 20584 - protein, 9 aa, Homo sapiens
  Table A; HLA-B*15:01; CTNNB1; D32N; 1
YLNSGIHSG

SEQ ID NO: 20585 - protein, 9 aa, Homo sapiens
  Table A; HLA-B*39:01; CTNNB1; D32N; 0
YLNSGIHSG

SEQ ID NO: 20586 - protein, 9 aa, Homo sapiens
  Table A; HLA-B*46:01; CTNNB1; D32N; 0
YLNSGIHSG

SEQ ID NO: 20587 - protein, 9 aa, Homo sapiens
  Table A; HLA-B*48:01; CTNNB1; D32N; 0
YLNSGIHSG

SEQ ID NO: 20588 - protein, 9 aa, Homo sapiens
  Table A; HLA-B*54:01; CTNNB1; D32N; 0
YLNSGIHSG

SEQ ID NO: 20589 - protein, 10 aa, Homo sapiens
  Table A; HLA-A*02:01; CTNNB1; D32N; 1
YLNSGIHSGA

SEQ ID NO: 20590 - protein, 10 aa, Homo sapiens
  Table A; HLA-A*02:03; CTNNB1; D32N; 0
YLNSGIHSGA

SEQ ID NO: 20591 - protein, 10 aa, Homo sapiens
  Table A; HLA-A*02:04; CTNNB1; D32N; 0
YLNSGIHSGA

SEQ ID NO: 20592 - protein, 10 aa, Homo sapiens
  Table A; HLA-A*02:05; CTNNB1; D32N; 0
YLNSGIHSGA

SEQ ID NO: 20593 - protein, 10 aa, Homo sapiens
  Table A; HLA-A*02:06; CTNNB1; D32N; 0
YLNSGIHSGA

SEQ ID NO: 20594 - protein, 10 aa, Homo sapiens
  Table A; HLA-A*02:07; CTNNB1; D32N; 0
YLNSGIHSGA

SEQ ID NO: 20595 - protein, 10 aa, Homo sapiens
  Table A; HLA-A*02:08; CTNNB1; D32N; 0
YLNSGIHSGA

SEQ ID NO: 20596 - protein, 10 aa, Homo sapiens
  Table A; HLA-A*03:01; CTNNB1; D32N; 1
YLNSGIHSGA

SEQ ID NO: 20597 - protein, 10 aa, Homo sapiens
  Table A; HLA-A*03:02; CTNNB1; D32N; 0
YLNSGIHSGA

SEQ ID NO: 20598 - protein, 10 aa, Homo sapiens
  Table A; HLA-A*26:03; CTNNB1; D32N; 0
YLNSGIHSGA

SEQ ID NO: 20599 - protein, 10 aa, Homo sapiens
  Table A; HLA-A*29:02; CTNNB1; D32N; 1
YLNSGIHSGA

SEQ ID NO: 20600 - protein, 10 aa, Homo sapiens
  Table A; HLA-A*30:01; CTNNB1; D32N; 0
YLNSGIHSGA

SEQ ID NO: 20601 - protein, 10 aa, Homo sapiens
  Table A; HLA-A*31:01; CTNNB1; D32N; 1
YLNSGIHSGA

SEQ ID NO: 20602 - protein, 10 aa, Homo sapiens
  Table A; HLA-A*33:03; CTNNB1; D32N; 0
YLNSGIHSGA

SEQ ID NO: 20603 - protein, 10 aa, Homo sapiens
  Table A; HLA-A*68:01; CTNNB1; D32N; 1
YLNSGIHSGA

SEQ ID NO: 20604 - protein, 10 aa, Homo sapiens
  Table A; HLA-A*68:02; CTNNB1; D32N; 0
YLNSGIHSGA

SEQ ID NO: 20605 - protein, 10 aa, Homo sapiens
  Table A; HLA-B*08:01; CTNNB1; D32N; 1
YLNSGIHSGA

SEQ ID NO: 20606 - protein, 10 aa, Homo sapiens
  Table A; HLA-B*13:02; CTNNB1; D32N; 1
YLNSGIHSGA

SEQ ID NO: 20607 - protein, 10 aa, Homo sapiens
  Table A; HLA-B*15:01; CTNNB1; D32N; 1
YLNSGIHSGA

SEQ ID NO: 20608 - protein, 10 aa, Homo sapiens
  Table A; HLA-B*39:06; CTNNB1; D32N; 0
YLNSGIHSGA

SEQ ID NO: 20609 - protein, 10 aa, Homo sapiens
  Table A; HLA-B*40:02; CTNNB1; D32N; 0
YLNSGIHSGA

SEQ ID NO: 20610 - protein, 10 aa, Homo sapiens
  Table A; HLA-B*48:01; CTNNB1; D32N; 0
YLNSGIHSGA

SEQ ID NO: 20611 - protein, 10 aa, Homo sapiens
  Table A; HLA-B*50:01; CTNNB1; D32N; 0
YLNSGIHSGA

SEQ ID NO: 20612 - protein, 10 aa, Homo sapiens
  Table A; HLA-B*54:01; CTNNB1; D32N; 0
YLNSGIHSGA

SEQ ID NO: 20613 - protein, 10 aa, Homo sapiens
  Table A; HLA-B*56:01; CTNNB1; D32N; 0
YLNSGIHSGA

SEQ ID NO: 20614 - protein, 10 aa, Homo sapiens
  Table A; HLA-C*08:03; CTNNB1; D32N; 0
YLNSGIHSGA

SEQ ID NO: 20615 - protein, 11 aa, Homo sapiens
  Table A; HLA-A*02:01; CTNNB1; D32N; 1
YLNSGIHSGAT

SEQ ID NO: 20616 - protein, 11 aa, Homo sapiens
  Table A; HLA-A*02:03; CTNNB1; D32N; 0
YLNSGIHSGAT

SEQ ID NO: 20617 - protein, 11 aa, Homo sapiens
  Table A; HLA-A*31:01; CTNNB1; D32N; 1
YLNSGIHSGAT

SEQ ID NO: 20618 - protein, 11 aa, Homo sapiens
  Table A; HLA-B*08:01; CTNNB1; D32N; 1
YLNSGIHSGAT

SEQ ID NO: 20619 - protein, 11 aa, Homo sapiens
  Table A; HLA-B*15:01; CTNNB1; D32N; 1
YLNSGIHSGAT

SEQ ID NO: 20620 - protein, 11 aa, Homo sapiens
  Table A; HLA-B*48:01; CTNNB1; D32N; 0
YLNSGIHSGAT

SEQ ID NO: 20621 - protein, 8 aa, Homo sapiens
  Table A; HLA-A*02:04; EP300; D1399N; 0
YLNSVHFF

SEQ ID NO: 20622 - protein, 8 aa, Homo sapiens
  Table A; HLA-A*23:01; EP300; D1399N; 0
YLNSVHFF

SEQ ID NO: 20623 - protein, 9 aa, Homo sapiens
  Table A; HLA-A*31:01; EP300; D1399N; 1
YLNSVHFFR

SEQ ID NO: 20624 - protein, 8 aa, Homo sapiens
  Table A; HLA-B*35:08; ERBB2; S310Y; 0
YLSTDVGY

SEQ ID NO: 20625 - protein, 8 aa, Homo sapiens
  Table A; HLA-B*39:01; ERBB2; S310Y; 0
YLSTDVGY

SEQ ID NO: 20626 - protein, 9 aa, Homo sapiens
  Table A; HLA-A*02:03; ERBB2; S310Y; 0
YLSTDVGYC

SEQ ID NO: 20627 - protein, 9 aa, Homo sapiens
  Table A; HLA-A*02:01; CTNNB1; D32V; 1
YLVSGIHSG

SEQ ID NO: 20628 - protein, 9 aa, Homo sapiens
  Table A; HLA-A*02:03; CTNNB1; D32V; 0
YLVSGIHSG

SEQ ID NO: 20629 - protein, 9 aa, Homo sapiens
  Table A; HLA-A*02:04; CTNNB1; D32V; 0
YLVSGIHSG

SEQ ID NO: 20630 - protein, 9 aa, Homo sapiens
  Table A; HLA-A*02:05; CTNNB1; D32V; 0
YLVSGIHSG

SEQ ID NO: 20631 - protein, 9 aa, Homo sapiens
  Table A; HLA-A*02:06; CTNNB1; D32V; 0
YLVSGIHSG

SEQ ID NO: 20632 - protein, 9 aa, Homo sapiens
  Table A; HLA-A*02:07; CTNNB1; D32V; 0
YLVSGIHSG

SEQ ID NO: 20633 - protein, 9 aa, Homo sapiens
  Table A; HLA-A*26:01; CTNNB1; D32V; 1
YLVSGIHSG

SEQ ID NO: 20634 - protein, 9 aa, Homo sapiens
  Table A; HLA-A*68:02; CTNNB1; D32V; 0
YLVSGIHSG

SEQ ID NO: 20635 - protein, 9 aa, Homo sapiens
  Table A; HLA-B*13:02; CTNNB1; D32V; 1
YLVSGIHSG

SEQ ID NO: 20636 - protein, 9 aa, Homo sapiens
  Table A; HLA-B*40:02; CTNNB1; D32V; 0
YLVSGIHSG

SEQ ID NO: 20637 - protein, 9 aa, Homo sapiens
  Table A; HLA-B*54:01; CTNNB1; D32V; 0
YLVSGIHSG

SEQ ID NO: 20638 - protein, 10 aa, Homo sapiens
  Table A; HLA-A*02:01; CTNNB1; D32V; 1
YLVSGIHSGA

SEQ ID NO: 20639 - protein, 10 aa, Homo sapiens
  Table A; HLA-A*02:03; CTNNB1; D32V; 0
YLVSGIHSGA

SEQ ID NO: 20640 - protein, 10 aa, Homo sapiens
  Table A; HLA-A*02:04; CTNNB1; D32V; 0
YLVSGIHSGA

SEQ ID NO: 20641 - protein, 10 aa, Homo sapiens
  Table A; HLA-A*02:05; CTNNB1; D32V; 0
YLVSGIHSGA

SEQ ID NO: 20642 - protein, 10 aa, Homo sapiens
  Table A; HLA-A*02:06; CTNNB1; D32V; 0
YLVSGIHSGA

SEQ ID NO: 20643 - protein, 10 aa, Homo sapiens
  Table A; HLA-A*02:07; CTNNB1; D32V; 0
YLVSGIHSGA

SEQ ID NO: 20644 - protein, 10 aa, Homo sapiens
  Table A; HLA-A*02:08; CTNNB1; D32V; 0
YLVSGIHSGA

SEQ ID NO: 20645 - protein, 10 aa, Homo sapiens
  Table A; HLA-A*03:01; CTNNB1; D32V; 1
YLVSGIHSGA

SEQ ID NO: 20646 - protein, 10 aa, Homo sapiens
  Table A; HLA-A*26:03; CTNNB1; D32V; 0
YLVSGIHSGA

SEQ ID NO: 20647 - protein, 10 aa, Homo sapiens
  Table A; HLA-A*29:02; CTNNB1; D32V; 1
YLVSGIHSGA

SEQ ID NO: 20648 - protein, 10 aa, Homo sapiens
  Table A; HLA-A*30:01; CTNNB1; D32V; 0
YLVSGIHSGA

SEQ ID NO: 20649 - protein, 10 aa, Homo sapiens
  Table A; HLA-A*31:01; CTNNB1; D32V; 1
YLVSGIHSGA

SEQ ID NO: 20650 - protein, 10 aa, Homo sapiens
  Table A; HLA-A*68:01; CTNNB1; D32V; 1
YLVSGIHSGA

SEQ ID NO: 20651 - protein, 10 aa, Homo sapiens
  Table A; HLA-A*68:02; CTNNB1; D32V; 0
YLVSGIHSGA

SEQ ID NO: 20652 - protein, 10 aa, Homo sapiens
  Table A; HLA-B*13:02; CTNNB1; D32V; 1
YLVSGIHSGA

SEQ ID NO: 20653 - protein, 10 aa, Homo sapiens
  Table A; HLA-B*15:01; CTNNB1; D32V; 1
YLVSGIHSGA

SEQ ID NO: 20654 - protein, 10 aa, Homo sapiens
  Table A; HLA-B*40:02; CTNNB1; D32V; 0
YLVSGIHSGA

SEQ ID NO: 20655 - protein, 10 aa, Homo sapiens
  Table A; HLA-B*48:01; CTNNB1; D32V; 0
YLVSGIHSGA

SEQ ID NO: 20656 - protein, 10 aa, Homo sapiens
  Table A; HLA-B*50:01; CTNNB1; D32V; 0
YLVSGIHSGA

SEQ ID NO: 20657 - protein, 10 aa, Homo sapiens
  Table A; HLA-B*54:01; CTNNB1; D32V; 0
YLVSGIHSGA

SEQ ID NO: 20658 - protein, 10 aa, Homo sapiens
  Table A; HLA-C*08:01; CTNNB1; D32V; 0
YLVSGIHSGA

SEQ ID NO: 20659 - protein, 11 aa, Homo sapiens
  Table A; HLA-A*02:01; CTNNB1; D32V; 1
YLVSGIHSGAT

SEQ ID NO: 20660 - protein, 11 aa, Homo sapiens
  Table A; HLA-A*02:03; CTNNB1; D32V; 0
YLVSGIHSGAT

SEQ ID NO: 20661 - protein, 11 aa, Homo sapiens
  Table A; HLA-A*68:02; CTNNB1; D32V; 0
YLVSGIHSGAT

SEQ ID NO: 20662 - protein, 11 aa, Homo sapiens
  Table A; HLA-B*48:01; CTNNB1; D32V; 0
YLVSGIHSGAT

SEQ ID NO: 20663 - protein, 9 aa, Homo sapiens
  Table A; HLA-A*02:01; CTNNB1; D32Y; 1
YLYSGIHSG

SEQ ID NO: 20664 - protein, 9 aa, Homo sapiens
  Table A; HLA-A*02:03; CTNNB1; D32Y; 0
YLYSGIHSG

SEQ ID NO: 20665 - protein, 9 aa, Homo sapiens
  Table A; HLA-A*02:04; CTNNB1; D32Y; 0
YLYSGIHSG

SEQ ID NO: 20666 - protein, 9 aa, Homo sapiens
  Table A; HLA-A*02:07; CTNNB1; D32Y; 0
YLYSGIHSG

SEQ ID NO: 20667 - protein, 9 aa, Homo sapiens
  Table A; HLA-A*03:01; CTNNB1; D32Y; 1
YLYSGIHSG

SEQ ID NO: 20668 - protein, 9 aa, Homo sapiens
  Table A; HLA-A*11:01; CTNNB1; D32Y; 1
YLYSGIHSG

SEQ ID NO: 20669 - protein, 9 aa, Homo sapiens
  Table A; HLA-A*26:01; CTNNB1; D32Y; 0
YLYSGIHSG

SEQ ID NO: 20670 - protein, 9 aa, Homo sapiens
  Table A; HLA-A*26:03; CTNNB1; D32Y; 0
YLYSGIHSG

SEQ ID NO: 20671 - protein, 9 aa, Homo sapiens
  Table A; HLA-A*29:02; CTNNB1; D32Y; 1
YLYSGIHSG

SEQ ID NO: 20672 - protein, 9 aa, Homo sapiens
  Table A; HLA-A*30:01; CTNNB1; D32Y; 0
YLYSGIHSG

SEQ ID NO: 20673 - protein, 9 aa, Homo sapiens
  Table A; HLA-A*31:01; CTNNB1; D32Y; 0
YLYSGIHSG

SEQ ID NO: 20674 - protein, 9 aa, Homo sapiens
  Table A; HLA-A*33:01; CTNNB1; D32Y; 0
YLYSGIHSG

SEQ ID NO: 20675 - protein, 9 aa, Homo sapiens
  Table A; HLA-A*33:03; CTNNB1; D32Y; 0
YLYSGIHSG

SEQ ID NO: 20676 - protein, 9 aa, Homo sapiens
  Table A; HLA-A*68:01; CTNNB1; D32Y; 0
YLYSGIHSG

SEQ ID NO: 20677 - protein, 9 aa, Homo sapiens
  Table A; HLA-A*68:02; CTNNB1; D32Y; 0
YLYSGIHSG

SEQ ID NO: 20678 - protein, 9 aa, Homo sapiens
  Table A; HLA-B*08:01; CTNNB1; D32Y; 1
YLYSGIHSG

SEQ ID NO: 20679 - protein, 9 aa, Homo sapiens
  Table A; HLA-B*13:02; CTNNB1; D32Y; 0
YLYSGIHSG

SEQ ID NO: 20680 - protein, 9 aa, Homo sapiens
  Table A; HLA-B*15:01; CTNNB1; D32Y; 1
YLYSGIHSG

SEQ ID NO: 20681 - protein, 9 aa, Homo sapiens
  Table A; HLA-B*15:02; CTNNB1; D32Y; 0
YLYSGIHSG

SEQ ID NO: 20682 - protein, 9 aa, Homo sapiens
  Table A; HLA-B*35:01; CTNNB1; D32Y; 1
YLYSGIHSG

SEQ ID NO: 20683 - protein, 9 aa, Homo sapiens
  Table A; HLA-B*39:06; CTNNB1; D32Y; 0
YLYSGIHSG

SEQ ID NO: 20684 - protein, 9 aa, Homo sapiens
  Table A; HLA-B*46:01; CTNNB1; D32Y; 0
YLYSGIHSG

SEQ ID NO: 20685 - protein, 9 aa, Homo sapiens
  Table A; HLA-B*50:01; CTNNB1; D32Y; 0
YLYSGIHSG

SEQ ID NO: 20686 - protein, 9 aa, Homo sapiens
  Table A; HLA-B*54:01; CTNNB1; D32Y; 0
YLYSGIHSG

SEQ ID NO: 20687 - protein, 9 aa, Homo sapiens
  Table A; HLA-C*08:01; CTNNB1; D32Y; 0
YLYSGIHSG

SEQ ID NO: 20688 - protein, 10 aa, Homo sapiens
  Table A; HLA-A*02:01; CTNNB1; D32Y; 1
YLYSGIHSGA

SEQ ID NO: 20689 - protein, 10 aa, Homo sapiens
  Table A; HLA-A*02:03; CTNNB1; D32Y; 0
YLYSGIHSGA

SEQ ID NO: 20690 - protein, 10 aa, Homo sapiens
  Table A; HLA-A*02:04; CTNNB1; D32Y; 0
YLYSGIHSGA

SEQ ID NO: 20691 - protein, 10 aa, Homo sapiens
  Table A; HLA-A*02:05; CTNNB1; D32Y; 0
YLYSGIHSGA

SEQ ID NO: 20692 - protein, 10 aa, Homo sapiens
  Table A; HLA-A*02:06; CTNNB1; D32Y; 0
YLYSGIHSGA

SEQ ID NO: 20693 - protein, 10 aa, Homo sapiens
  Table A; HLA-A*02:07; CTNNB1; D32Y; 0
YLYSGIHSGA

SEQ ID NO: 20694 - protein, 10 aa, Homo sapiens
  Table A; HLA-A*02:08; CTNNB1; D32Y; 0
YLYSGIHSGA

SEQ ID NO: 20695 - protein, 10 aa, Homo sapiens
  Table A; HLA-A*03:01; CTNNB1; D32Y; 1
YLYSGIHSGA

SEQ ID NO: 20696 - protein, 10 aa, Homo sapiens
  Table A; HLA-A*26:03; CTNNB1; D32Y; 0
YLYSGIHSGA

SEQ ID NO: 20697 - protein, 10 aa, Homo sapiens
  Table A; HLA-A*29:02; CTNNB1; D32Y; 1
YLYSGIHSGA

SEQ ID NO: 20698 - protein, 10 aa, Homo sapiens
  Table A; HLA-A*30:01; CTNNB1; D32Y; 0
YLYSGIHSGA

SEQ ID NO: 20699 - protein, 10 aa, Homo sapiens
  Table A; HLA-A*31:01; CTNNB1; D32Y; 0
YLYSGIHSGA

SEQ ID NO: 20700 - protein, 10 aa, Homo sapiens
  Table A; HLA-A*33:03; CTNNB1; D32Y; 0
YLYSGIHSGA

SEQ ID NO: 20701 - protein, 10 aa, Homo sapiens
  Table A; HLA-A*68:02; CTNNB1; D32Y; 0
YLYSGIHSGA

SEQ ID NO: 20702 - protein, 10 aa, Homo sapiens
  Table A; HLA-B*08:01; CTNNB1; D32Y; 1
YLYSGIHSGA

SEQ ID NO: 20703 - protein, 10 aa, Homo sapiens
  Table A; HLA-B*13:02; CTNNB1; D32Y; 0
YLYSGIHSGA

SEQ ID NO: 20704 - protein, 10 aa, Homo sapiens
  Table A; HLA-B*15:01; CTNNB1; D32Y; 1
YLYSGIHSGA

SEQ ID NO: 20705 - protein, 10 aa, Homo sapiens
  Table A; HLA-B*15:02; CTNNB1; D32Y; 0
YLYSGIHSGA

SEQ ID NO: 20706 - protein, 10 aa, Homo sapiens
  Table A; HLA-B*39:06; CTNNB1; D32Y; 0
YLYSGIHSGA

SEQ ID NO: 20707 - protein, 10 aa, Homo sapiens
  Table A; HLA-B*40:02; CTNNB1; D32Y; 0
YLYSGIHSGA

SEQ ID NO: 20708 - protein, 10 aa, Homo sapiens
  Table A; HLA-B*48:01; CTNNB1; D32Y; 0
YLYSGIHSGA

SEQ ID NO: 20709 - protein, 10 aa, Homo sapiens
  Table A; HLA-B*50:01; CTNNB1; D32Y; 0
YLYSGIHSGA

SEQ ID NO: 20710 - protein, 10 aa, Homo sapiens
  Table A; HLA-B*54:01; CTNNB1; D32Y; 0
YLYSGIHSGA

SEQ ID NO: 20711 - protein, 10 aa, Homo sapiens
  Table A; HLA-B*56:01; CTNNB1; D32Y; 0
YLYSGIHSGA

SEQ ID NO: 20712 - protein, 11 aa, Homo sapiens
  Table A; HLA-A*02:01; CTNNB1; D32Y; 1
YLYSGIHSGAT

SEQ ID NO: 20713 - protein, 11 aa, Homo sapiens
  Table A; HLA-A*02:03; CTNNB1; D32Y; 0
YLYSGIHSGAT

SEQ ID NO: 20714 - protein, 11 aa, Homo sapiens
  Table A; HLA-A*02:07; CTNNB1; D32Y; 0
YLYSGIHSGAT

SEQ ID NO: 20715 - protein, 11 aa, Homo sapiens
  Table A; HLA-A*03:01; CTNNB1; D32Y; 1
YLYSGIHSGAT

SEQ ID NO: 20716 - protein, 11 aa, Homo sapiens
  Table A; HLA-A*29:02; CTNNB1; D32Y; 1
YLYSGIHSGAT

SEQ ID NO: 20717 - protein, 11 aa, Homo sapiens
  Table A; HLA-A*31:01; CTNNB1; D32Y; 0
YLYSGIHSGAT

SEQ ID NO: 20718 - protein, 11 aa, Homo sapiens
  Table A; HLA-A*68:02; CTNNB1; D32Y; 0
YLYSGIHSGAT

SEQ ID NO: 20719 - protein, 11 aa, Homo sapiens
  Table A; HLA-B*08:01; CTNNB1; D32Y; 1
YLYSGIHSGAT

SEQ ID NO: 20720 - protein, 11 aa, Homo sapiens
  Table A; HLA-B*48:01; CTNNB1; D32Y; 0
YLYSGIHSGAT

SEQ ID NO: 20721 - protein, 11 aa, Homo sapiens
  Table A; HLA-C*07:04; CTNNB1; D32Y; 0
YLYSGIHSGAT

SEQ ID NO: 20722 - protein, 11 aa, Homo sapiens
  Table A; HLA-C*08:03; CTNNB1; D32Y; 0
YLYSGIHSGAT

SEQ ID NO: 20723 - protein, 8 aa, Homo sapiens
  Table A; HLA-B*15:01; TP53; C238F; 0
YMFNSSCM

SEQ ID NO: 20724 - protein, 8 aa, Homo sapiens
  Table A; HLA-B*15:02; TP53; C238F; 0
YMFNSSCM

SEQ ID NO: 20725 - protein, 8 aa, Homo sapiens
  Table A; HLA-B*15:03; TP53; C238F; 0
YMFNSSCM

SEQ ID NO: 20726 - protein, 8 aa, Homo sapiens
  Table A; HLA-C*08:01; TP53; C238F; 0
YMFNSSCM

SEQ ID NO: 20727 - protein, 8 aa, Homo sapiens
  Table A; HLA-C*14:02; TP53; C238F; 0
YMFNSSCM

SEQ ID NO: 20728 - protein, 8 aa, Homo sapiens
  Table A; HLA-A*03:01; CNBD1; L396P; 1
YMGKPKEK

SEQ ID NO: 20729 - protein, 8 aa, Homo sapiens
  Table A; HLA-A*03:02; CNBD1; L396P; 0
YMGKPKEK

SEQ ID NO: 20730 - protein, 8 aa, Homo sapiens
  Table A; HLA-A*11:01; CNBD1; L396P; 1
YMGKPKEK

SEQ ID NO: 20731 - protein, 9 aa, Homo sapiens
  Table A; HLA-A*02:03; PIK3CA; V344M; 0
YMNLNIRDI

SEQ ID NO: 20732 - protein, 9 aa, Homo sapiens
  Table A; HLA-A*02:07; CNTNAP2; T373M; 0
YMVPVFFNA

SEQ ID NO: 20733 - protein, 8 aa, Homo sapiens
  Table A; HLA-B*14:02; TP53; C238Y; 0
YMYNSSCM

SEQ ID NO: 20734 - protein, 8 aa, Homo sapiens
  Table A; HLA-B*15:01; TP53; C238Y; 0
YMYNSSCM

SEQ ID NO: 20735 - protein, 8 aa, Homo sapiens
  Table A; HLA-B*15:02; TP53; C238Y; 0
YMYNSSCM

SEQ ID NO: 20736 - protein, 8 aa, Homo sapiens
  Table A; HLA-B*15:03; TP53; C238Y; 0
YMYNSSCM

SEQ ID NO: 20737 - protein, 8 aa, Homo sapiens
  Table A; HLA-B*15:10; TP53; C238Y; 0
YMYNSSCM

SEQ ID NO: 20738 - protein, 8 aa, Homo sapiens
  Table A; HLA-C*08:01; TP53; C238Y; 0
YMYNSSCM

SEQ ID NO: 20739 - protein, 8 aa, Homo sapiens
  Table A; HLA-C*14:02; TP53; C238Y; 0
YMYNSSCM

SEQ ID NO: 20740 - protein, 10 aa, Homo sapiens
  Table A; HLA-A*26:03; GLI1; R637Q; 0
YNPNAGVTQR

SEQ ID NO: 20741 - protein, 10 aa, Homo sapiens
  Table A; HLA-A*33:03; GLI1; R637Q; 0
YNPNAGVTQR

SEQ ID NO: 20742 - protein, 10 aa, Homo sapiens
  Table A; HLA-A*68:01; GLI1; R637Q; 0
YNPNAGVTQR

SEQ ID NO: 20743 - protein, 10 aa, Homo sapiens
  Table A; HLA-B*27:02; ERBB2; S310Y; 0
YNYLSTDVGY

SEQ ID NO: 20744 - protein, 10 aa, Homo sapiens
  Table A; HLA-B*07:02; DICER1; S1344L; 1
YPDAHEGRLL

SEQ ID NO: 20745 - protein, 10 aa, Homo sapiens
  Table A; HLA-B*35:02; DICER1; S1344L; 0
YPDAHEGRLL

SEQ ID NO: 20746 - protein, 10 aa, Homo sapiens
  Table A; HLA-B*35:03; DICER1; S1344L; 0
YPDAHEGRLL

SEQ ID NO: 20747 - protein, 10 aa, Homo sapiens
  Table A; HLA-B*35:08; DICER1; S1344L; 0
YPDAHEGRLL

SEQ ID NO: 20748 - protein, 10 aa, Homo sapiens
  Table A; HLA-B*35:12; DICER1; S1344L; 0
YPDAHEGRLL

SEQ ID NO: 20749 - protein, 10 aa, Homo sapiens
  Table A; HLA-B*51:01; DICER1; S1344L; 1
YPDAHEGRLL

SEQ ID NO: 20750 - protein, 11 aa, Homo sapiens
  Table A; HLA-A*01:01; DICER1; S1344L; 1
YPDAHEGRLLY

SEQ ID NO: 20751 - protein, 11 aa, Homo sapiens
  Table A; HLA-B*35:01; DICER1; S1344L; 1
YPDAHEGRLLY

SEQ ID NO: 20752 - protein, 11 aa, Homo sapiens
  Table A; HLA-B*35:08; DICER1; S1344L; 0
YPDAHEGRLLY

SEQ ID NO: 20753 - protein, 8 aa, Homo sapiens
  Table A; HLA-B*54:01; PTEN; D92E; 0
YPFEEHNP

SEQ ID NO: 20754 - protein, 9 aa, Homo sapiens
  Table A; HLA-B*35:01; PTEN; D92E; 0
YPFEEHNPP

SEQ ID NO: 20755 - protein, 9 aa, Homo sapiens
  Table A; HLA-B*35:02; PTEN; D92E; 0
YPFEEHNPP

SEQ ID NO: 20756 - protein, 9 aa, Homo sapiens
  Table A; HLA-B*35:03; PTEN; D92E; 0
YPFEEHNPP

SEQ ID NO: 20757 - protein, 9 aa, Homo sapiens
  Table A; HLA-B*35:12; PTEN; D92E; 0
YPFEEHNPP

SEQ ID NO: 20758 - protein, 9 aa, Homo sapiens
  Table A; HLA-B*54:01; PTEN; D92E; 0
YPFEEHNPP

SEQ ID NO: 20759 - protein, 10 aa, Homo sapiens
  Table A; HLA-B*54:01; PTEN; D92E; 0
YPFEEHNPPQ

SEQ ID NO: 20760 - protein, 11 aa, Homo sapiens
  Table A; HLA-B*35:01; PTEN; D92E; 0
YPFEEHNPPQL

SEQ ID NO: 20761 - protein, 11 aa, Homo sapiens
  Table A; HLA-B*35:02; PTEN; D92E; 0
YPFEEHNPPQL

SEQ ID NO: 20762 - protein, 11 aa, Homo sapiens
  Table A; HLA-B*35:03; PTEN; D92E; 0
YPFEEHNPPQL

SEQ ID NO: 20763 - protein, 11 aa, Homo sapiens
  Table A; HLA-B*35:08; PTEN; D92E; 0
YPFEEHNPPQL

SEQ ID NO: 20764 - protein, 11 aa, Homo sapiens
  Table A; HLA-B*35:12; PTEN; D92E; 0
YPFEEHNPPQL

SEQ ID NO: 20765 - protein, 11 aa, Homo sapiens
  Table A; HLA-B*54:01; PTEN; D92E; 0
YPFEEHNPPQL

SEQ ID NO: 20766 - protein, 8 aa, Homo sapiens
  Table A; HLA-B*39:06; PREX2; H1404Y; 0
YPVLFAQA

SEQ ID NO: 20767 - protein, 8 aa, Homo sapiens
  Table A; HLA-B*54:01; PREX2; H1404Y; 0
YPVLFAQA

SEQ ID NO: 20768 - protein, 8 aa, Homo sapiens
  Table A; HLA-B*55:01; PREX2; H1404Y; 0
YPVLFAQA

SEQ ID NO: 20769 - protein, 8 aa, Homo sapiens
  Table A; HLA-B*55:02; PREX2; H1404Y; 0
YPVLFAQA

SEQ ID NO: 20770 - protein, 8 aa, Homo sapiens
  Table A; HLA-B*56:01; PREX2; H1404Y; 0
YPVLFAQA

SEQ ID NO: 20771 - protein, 9 aa, Homo sapiens
  Table A; HLA-B*07:02; PREX2; H1404Y; 1
YPVLFAQAL

SEQ ID NO: 20772 - protein, 9 aa, Homo sapiens
  Table A; HLA-B*14:02; PREX2; H1404Y; 0
YPVLFAQAL

SEQ ID NO: 20773 - protein, 9 aa, Homo sapiens
  Table A; HLA-B*15:02; PREX2; H1404Y; 0
YPVLFAQAL

SEQ ID NO: 20774 - protein, 9 aa, Homo sapiens
  Table A; HLA-B*35:01; PREX2; H1404Y; 1
YPVLFAQAL

SEQ ID NO: 20775 - protein, 9 aa, Homo sapiens
  Table A; HLA-B*35:03; PREX2; H1404Y; 0
YPVLFAQAL

SEQ ID NO: 20776 - protein, 9 aa, Homo sapiens
  Table A; HLA-B*35:12; PREX2; H1404Y; 0
YPVLFAQAL

SEQ ID NO: 20777 - protein, 9 aa, Homo sapiens
  Table A; HLA-B*51:01; PREX2; H1404Y; 1
YPVLFAQAL

SEQ ID NO: 20778 - protein, 9 aa, Homo sapiens
  Table A; HLA-B*54:01; PREX2; H1404Y; 0
YPVLFAQAL

SEQ ID NO: 20779 - protein, 9 aa, Homo sapiens
  Table A; HLA-B*55:02; PREX2; H1404Y; 0
YPVLFAQAL

SEQ ID NO: 20780 - protein, 9 aa, Homo sapiens
  Table A; HLA-C*08:01; PREX2; H1404Y; 0
YPVLFAQAL

SEQ ID NO: 20781 - protein, 9 aa, Homo sapiens
  Table A; HLA-B*54:01; TP53; C141Y; 0
YPVQLWVDS

SEQ ID NO: 20782 - protein, 9 aa, Homo sapiens
  Table A; HLA-A*02:04; TP53; R110L; 0
YQGSYGFLL

SEQ ID NO: 20783 - protein, 9 aa, Homo sapiens
  Table A; HLA-A*02:05; CDH1; D254Y; 0
YQNDNKPEF

SEQ ID NO: 20784 - protein, 9 aa, Homo sapiens
  Table A; HLA-A*02:06; CDH1; D254Y; 0
YQNDNKPEF

SEQ ID NO: 20785 - protein, 9 aa, Homo sapiens
  Table A; HLA-A*32:01; CDH1; D254Y; 0
YQNDNKPEF

SEQ ID NO: 20786 - protein, 9 aa, Homo sapiens
  Table A; HLA-B*13:01; CDH1; D254Y; 0
YQNDNKPEF

SEQ ID NO: 20787 - protein, 9 aa, Homo sapiens
  Table A; HLA-B*15:01; CDH1; D254Y; 1
YQNDNKPEF

SEQ ID NO: 20788 - protein, 9 aa, Homo sapiens
  Table A; HLA-B*15:02; CDH1; D254Y; 0
YQNDNKPEF

SEQ ID NO: 20789 - protein, 9 aa, Homo sapiens
  Table A; HLA-B*15:03; CDH1; D254Y; 0
YQNDNKPEF

SEQ ID NO: 20790 - protein, 9 aa, Homo sapiens
  Table A; HLA-B*15:10; CDH1; D254Y; 0
YQNDNKPEF

SEQ ID NO: 20791 - protein, 9 aa, Homo sapiens
  Table A; HLA-B*35:01; CDH1; D254Y; 1
YQNDNKPEF

SEQ ID NO: 20792 - protein, 9 aa, Homo sapiens
  Table A; HLA-B*38:01; CDH1; D254Y; 0
YQNDNKPEF

SEQ ID NO: 20793 - protein, 9 aa, Homo sapiens
  Table A; HLA-B*39:01; CDH1; D254Y; 0
YQNDNKPEF

SEQ ID NO: 20794 - protein, 9 aa, Homo sapiens
  Table A; HLA-B*46:01; CDH1; D254Y; 0
YQNDNKPEF

SEQ ID NO: 20795 - protein, 9 aa, Homo sapiens
  Table A; HLA-B*58:01; CDH1; D254Y; 0
YQNDNKPEF

SEQ ID NO: 20796 - protein, 9 aa, Homo sapiens
  Table A; HLA-C*02:02; CDH1; D254Y; 0
YQNDNKPEF

SEQ ID NO: 20797 - protein, 9 aa, Homo sapiens
  Table A; HLA-B*39:01; TP53; D281Y; 0
YRRTEEENL

SEQ ID NO: 20798 - protein, 9 aa, Homo sapiens
  Table A; HLA-C*06:02; TP53; D281Y; 0
YRRTEEENL

SEQ ID NO: 20799 - protein, 8 aa, Homo sapiens
  Table A; HLA-A*02:03; EGFR; A289T; 0
YSFGTTCV

SEQ ID NO: 20800 - protein, 8 aa, Homo sapiens
  Table A; HLA-B*13:02; EGFR; A289T; 0
YSFGTTCV

SEQ ID NO: 20801 - protein, 8 aa, Homo sapiens
  Table A; HLA-B*51:01; EGFR; A289T; 1
YSFGTTCV

SEQ ID NO: 20802 - protein, 8 aa, Homo sapiens
  Table A; HLA-B*54:01; EGFR; A289T; 0
YSFGTTCV

SEQ ID NO: 20803 - protein, 8 aa, Homo sapiens
  Table A; HLA-C*12:03; EGFR; A289T; 1
YSFGTTCV

SEQ ID NO: 20804 - protein, 9 aa, Homo sapiens
  Table A; HLA-A*03:01; EGFR; A289T; 1
YSFGTTCVK

SEQ ID NO: 20805 - protein, 9 aa, Homo sapiens
  Table A; HLA-A*03:02; EGFR; A289T; 0
YSFGTTCVK

SEQ ID NO: 20806 - protein, 9 aa, Homo sapiens
  Table A; HLA-A*11:01; EGFR; A289T; 1
YSFGTTCVK

SEQ ID NO: 20807 - protein, 9 aa, Homo sapiens
  Table A; HLA-A*68:01; EGFR; A289T; 0
YSFGTTCVK

SEQ ID NO: 20808 - protein, 10 aa, Homo sapiens
  Table A; HLA-A*03:01; EGFR; A289T; 1
YSFGTTCVKK

SEQ ID NO: 20809 - protein, 10 aa, Homo sapiens
  Table A; HLA-A*03:02; EGFR; A289T; 0
YSFGTTCVKK

SEQ ID NO: 20810 - protein, 10 aa, Homo sapiens
  Table A; HLA-A*11:01; EGFR; A289T; 1
YSFGTTCVKK

SEQ ID NO: 20811 - protein, 10 aa, Homo sapiens
  Table A; HLA-A*68:01; EGFR; A289T; 0
YSFGTTCVKK

SEQ ID NO: 20812 - protein, 8 aa, Homo sapiens
  Table A; HLA-A*02:03; EGFR; A289V; 0
YSFGVTCV

SEQ ID NO: 20813 - protein, 8 aa, Homo sapiens
  Table A; HLA-A*68:02; EGFR; A289V; 0
YSFGVTCV

SEQ ID NO: 20814 - protein, 8 aa, Homo sapiens
  Table A; HLA-B*13:02; EGFR; A289V; 1
YSFGVTCV

SEQ ID NO: 20815 - protein, 8 aa, Homo sapiens
  Table A; HLA-B*39:06; EGFR; A289V; 0
YSFGVTCV

SEQ ID NO: 20816 - protein, 8 aa, Homo sapiens
  Table A; HLA-B*40:02; EGFR; A289V; 0
YSFGVTCV

SEQ ID NO: 20817 - protein, 8 aa, Homo sapiens
  Table A; HLA-B*51:01; EGFR; A289V; 1
YSFGVTCV

SEQ ID NO: 20818 - protein, 8 aa, Homo sapiens
  Table A; HLA-B*54:01; EGFR; A289V; 0
YSFGVTCV

SEQ ID NO: 20819 - protein, 8 aa, Homo sapiens
  Table A; HLA-C*12:03; EGFR; A289V; 1
YSFGVTCV

SEQ ID NO: 20820 - protein, 9 aa, Homo sapiens
  Table A; HLA-A*03:01; EGFR; A289V; 1
YSFGVTCVK

SEQ ID NO: 20821 - protein, 9 aa, Homo sapiens
  Table A; HLA-A*11:01; EGFR; A289V; 1
YSFGVTCVK

SEQ ID NO: 20822 - protein, 9 aa, Homo sapiens
  Table A; HLA-A*68:01; EGFR; A289V; 1
YSFGVTCVK

SEQ ID NO: 20823 - protein, 10 aa, Homo sapiens
  Table A; HLA-A*11:01; EGFR; A289V; 1
YSFGVTCVKK

SEQ ID NO: 20824 - protein, 10 aa, Homo sapiens
  Table A; HLA-A*68:01; EGFR; A289V; 1
YSFGVTCVKK

SEQ ID NO: 20825 - protein, 8 aa, Homo sapiens
  Table A; HLA-A*02:03; CTNNB1; D32Y; 0
YSGIHSGA

SEQ ID NO: 20826 - protein, 8 aa, Homo sapiens
  Table A; HLA-A*02:05; CTNNB1; D32Y; 0
YSGIHSGA

SEQ ID NO: 20827 - protein, 8 aa, Homo sapiens
  Table A; HLA-A*02:08; CTNNB1; D32Y; 0
YSGIHSGA

SEQ ID NO: 20828 - protein, 8 aa, Homo sapiens
  Table A; HLA-B*08:01; CTNNB1; D32Y; 1
YSGIHSGA

SEQ ID NO: 20829 - protein, 8 aa, Homo sapiens
  Table A; HLA-B*39:01; CTNNB1; D32Y; 0
YSGIHSGA

SEQ ID NO: 20830 - protein, 8 aa, Homo sapiens
  Table A; HLA-B*39:06; CTNNB1; D32Y; 0
YSGIHSGA

SEQ ID NO: 20831 - protein, 8 aa, Homo sapiens
  Table A; HLA-B*48:01; CTNNB1; D32Y; 0
YSGIHSGA

SEQ ID NO: 20832 - protein, 8 aa, Homo sapiens
  Table A; HLA-B*54:01; CTNNB1; D32Y; 0
YSGIHSGA

SEQ ID NO: 20833 - protein, 8 aa, Homo sapiens
  Table A; HLA-C*08:01; CTNNB1; D32Y; 0
YSGIHSGA

SEQ ID NO: 20834 - protein, 8 aa, Homo sapiens
  Table A; HLA-C*08:03; CTNNB1; D32Y; 0
YSGIHSGA

SEQ ID NO: 20835 - protein, 8 aa, Homo sapiens
  Table A; HLA-C*12:03; CTNNB1; D32Y; 1
YSGIHSGA

SEQ ID NO: 20836 - protein, 9 aa, Homo sapiens
  Table A; HLA-A*02:03; CTNNB1; D32Y; 0
YSGIHSGAT

SEQ ID NO: 20837 - protein, 9 aa, Homo sapiens
  Table A; HLA-B*08:01; CTNNB1; D32Y; 1
YSGIHSGAT

SEQ ID NO: 20838 - protein, 9 aa, Homo sapiens
  Table A; HLA-B*27:05; CTNNB1; D32Y; 1
YSGIHSGAT

SEQ ID NO: 20839 - protein, 9 aa, Homo sapiens
  Table A; HLA-B*48:01; CTNNB1; D32Y; 0
YSGIHSGAT

SEQ ID NO: 20840 - protein, 9 aa, Homo sapiens
  Table A; HLA-C*07:04; CTNNB1; D32Y; 0
YSGIHSGAT

SEQ ID NO: 20841 - protein, 9 aa, Homo sapiens
  Table A; HLA-C*08:01; CTNNB1; D32Y; 0
YSGIHSGAT

SEQ ID NO: 20842 - protein, 9 aa, Homo sapiens
  Table A; HLA-C*08:03; CTNNB1; D32Y; 0
YSGIHSGAT

SEQ ID NO: 20843 - protein, 10 aa, Homo sapiens
  Table A; HLA-A*33:03; A1CF; E34K; 0
YSLVQKNGQR

SEQ ID NO: 20844 - protein, 8 aa, Homo sapiens
  Table A; HLA-A*02:07; TP53; L130F; 0
YSPAFNKM

SEQ ID NO: 20845 - protein, 8 aa, Homo sapiens
  Table A; HLA-C*01:02; TP53; L130F; 0
YSPAFNKM

SEQ ID NO: 20846 - protein, 9 aa, Homo sapiens
  Table A; HLA-B*57:01; TP53; L130F; 0
YSPAFNKMF

SEQ ID NO: 20847 - protein, 9 aa, Homo sapiens
  Table A; HLA-C*01:02; TP53; L130F; 0
YSPAFNKMF

SEQ ID NO: 20848 - protein, 9 aa, Homo sapiens
  Table A; HLA-C*02:02; TP53; L130F; 0
YSPAFNKMF

SEQ ID NO: 20849 - protein, 9 aa, Homo sapiens
  Table A; HLA-C*06:02; TP53; L130F; 0
YSPAFNKMF

SEQ ID NO: 20850 - protein, 9 aa, Homo sapiens
  Table A; HLA-C*12:03; TP53; L130F; 0
YSPAFNKMF

SEQ ID NO: 20851 - protein, 9 aa, Homo sapiens
  Table A; HLA-C*14:02; TP53; L130F; 0
YSPAFNKMF

SEQ ID NO: 20852 - protein, 9 aa, Homo sapiens
  Table A; HLA-C*16:01; TP53; L130F; 0
YSPAFNKMF

SEQ ID NO: 20853 - protein, 9 aa, Homo sapiens
  Table A; HLA-A*02:07; TP53; F134L; 0
YSPALNKML

SEQ ID NO: 20854 - protein, 9 aa, Homo sapiens
  Table A; HLA-C*01:02; TP53; F134L; 0
YSPALNKML

SEQ ID NO: 20855 - protein, 8 aa, Homo sapiens
  Table A; HLA-C*01:02; TP53; K132N; 0
YSPALNNM

SEQ ID NO: 20856 - protein, 9 aa, Homo sapiens
  Table A; HLA-A*02:07; TP53; K132N; 0
YSPALNNMF

SEQ ID NO: 20857 - protein, 9 aa, Homo sapiens
  Table A; HLA-A*23:01; TP53; K132N; 0
YSPALNNMF

SEQ ID NO: 20858 - protein, 9 aa, Homo sapiens
  Table A; HLA-A*24:02; TP53; K132N; 0
YSPALNNMF

SEQ ID NO: 20859 - protein, 9 aa, Homo sapiens
  Table A; HLA-B*58:01; TP53; K132N; 0
YSPALNNMF

SEQ ID NO: 20860 - protein, 9 aa, Homo sapiens
  Table A; HLA-C*01:02; TP53; K132N; 0
YSPALNNMF

SEQ ID NO: 20861 - protein, 9 aa, Homo sapiens
  Table A; HLA-B*57:01; TP53; K132R; 0
YSPALNRMF

SEQ ID NO: 20862 - protein, 9 aa, Homo sapiens
  Table A; HLA-C*01:02; TP53; K132R; 0
YSPALNRMF

SEQ ID NO: 20863 - protein, 9 aa, Homo sapiens
  Table A; HLA-C*16:01; TP53; K132R; 0
YSPALNRMF

SEQ ID NO: 20864 - protein, 9 aa, Homo sapiens
  Table A; HLA-B*50:01; ATM; R337C; 0
YSSGFCNIA

SEQ ID NO: 20865 - protein, 9 aa, Homo sapiens
  Table A; HLA-A*02:04; EZH2; M667T; 0
YTCSFLFNL

SEQ ID NO: 20866 - protein, 9 aa, Homo sapiens
  Table A; HLA-A*68:02; EZH2; M667T; 0
YTCSFLFNL

SEQ ID NO: 20867 - protein, 10 aa, Homo sapiens
  Table A; HLA-A*01:01; RAC1; P29L; 1
YTTNAFLGEY

SEQ ID NO: 20868 - protein, 10 aa, Homo sapiens
  Table A; HLA-A*25:01; RAC1; P29L; 0
YTTNAFLGEY

SEQ ID NO: 20869 - protein, 10 aa, Homo sapiens
  Table A; HLA-A*26:01; RAC1; P29L; 0
YTTNAFLGEY

SEQ ID NO: 20870 - protein, 10 aa, Homo sapiens
  Table A; HLA-A*26:02; RAC1; P29L; 0
YTTNAFLGEY

SEQ ID NO: 20871 - protein, 10 aa, Homo sapiens
  Table A; HLA-A*26:03; RAC1; P29L; 0
YTTNAFLGEY

SEQ ID NO: 20872 - protein, 10 aa, Homo sapiens
  Table A; HLA-A*29:01; RAC1; P29L; 0
YTTNAFLGEY

SEQ ID NO: 20873 - protein, 10 aa, Homo sapiens
  Table A; HLA-A*29:02; RAC1; P29L; 0
YTTNAFLGEY

SEQ ID NO: 20874 - protein, 10 aa, Homo sapiens
  Table A; HLA-A*30:02; RAC1; P29L; 0
YTTNAFLGEY

SEQ ID NO: 20875 - protein, 10 aa, Homo sapiens
  Table A; HLA-A*30:04; RAC1; P29L; 0
YTTNAFLGEY

SEQ ID NO: 20876 - protein, 10 aa, Homo sapiens
  Table A; HLA-A*68:02; RAC1; P29L; 0
YTTNAFLGEY

SEQ ID NO: 20877 - protein, 10 aa, Homo sapiens
  Table A; HLA-B*27:02; RAC1; P29L; 0
YTTNAFLGEY

SEQ ID NO: 20878 - protein, 10 aa, Homo sapiens
  Table A; HLA-C*03:02; RAC1; P29L; 0
YTTNAFLGEY

SEQ ID NO: 20879 - protein, 11 aa, Homo sapiens
  Table A; HLA-A*68:02; RAC1; P29L; 0
YTTNAFLGEYI

SEQ ID NO: 20880 - protein, 10 aa, Homo sapiens
  Table A; HLA-A*01:01; RAC1; P29S; 1
YTTNAFSGEY

SEQ ID NO: 20881 - protein, 10 aa, Homo sapiens
  Table A; HLA-A*25:01; RAC1; P29S; 1
YTTNAFSGEY

SEQ ID NO: 20882 - protein, 10 aa, Homo sapiens
  Table A; HLA-A*26:01; RAC1; P29S; 1
YTTNAFSGEY

SEQ ID NO: 20883 - protein, 10 aa, Homo sapiens
  Table A; HLA-A*26:03; RAC1; P29S; 0
YTTNAFSGEY

SEQ ID NO: 20884 - protein, 10 aa, Homo sapiens
  Table A; HLA-A*29:01; RAC1; P29S; 0
YTTNAFSGEY

SEQ ID NO: 20885 - protein, 10 aa, Homo sapiens
  Table A; HLA-A*29:02; RAC1; P29S; 1
YTTNAFSGEY

SEQ ID NO: 20886 - protein, 10 aa, Homo sapiens
  Table A; HLA-A*30:02; RAC1; P29S; 0
YTTNAFSGEY

SEQ ID NO: 20887 - protein, 10 aa, Homo sapiens
  Table A; HLA-A*30:04; RAC1; P29S; 0
YTTNAFSGEY

SEQ ID NO: 20888 - protein, 10 aa, Homo sapiens
  Table A; HLA-B*15:01; RAC1; P29S; 1
YTTNAFSGEY

SEQ ID NO: 20889 - protein, 10 aa, Homo sapiens
  Table A; HLA-B*27:02; RAC1; P29S; 0
YTTNAFSGEY

SEQ ID NO: 20890 - protein, 10 aa, Homo sapiens
  Table A; HLA-B*39:01; RAC1; P29S; 0
YTTNAFSGEY

SEQ ID NO: 20891 - protein, 10 aa, Homo sapiens
  Table A; HLA-C*03:02; RAC1; P29S; 0
YTTNAFSGEY

SEQ ID NO: 20892 - protein, 11 aa, Homo sapiens
  Table A; HLA-A*68:02; RAC1; P29S; 0
YTTNAFSGEYI

SEQ ID NO: 20893 - protein, 8 aa, Homo sapiens
  Table A; HLA-A*68:02; CTNNB1; K335I; 0
YTYEILLW

SEQ ID NO: 20894 - protein, 8 aa, Homo sapiens
  Table A; HLA-B*57:01; CTNNB1; K335I; 1
YTYEILLW

SEQ ID NO: 20895 - protein, 9 aa, Homo sapiens
  Table A; HLA-A*68:02; CTNNB1; K335I; 0
YTYEILLWT

SEQ ID NO: 20896 - protein, 10 aa, Homo sapiens
  Table A; HLA-A*68:02; CTNNB1; K335I; 0
YTYEILLWTT

SEQ ID NO: 20897 - protein, 8 aa, Homo sapiens
  Table A; HLA-A*33:03; SF3B1; R625C; 0
YVCNTTAR

SEQ ID NO: 20898 - protein, 8 aa, Homo sapiens
  Table A; HLA-A*68:01; SF3B1; R625C; 0
YVCNTTAR

SEQ ID NO: 20899 - protein, 9 aa, Homo sapiens
  Table A; HLA-A*68:02; SF3B1; R625C; 0
YVCNTTARA

SEQ ID NO: 20900 - protein, 9 aa, Homo sapiens
  Table A; HLA-B*54:01; SF3B1; R625C; 0
YVCNTTARA

SEQ ID NO: 20901 - protein, 10 aa, Homo sapiens
  Table A; HLA-A*25:01; SF3B1; R625C; 0
YVCNTTARAF

SEQ ID NO: 20902 - protein, 9 aa, Homo sapiens
  Table A; HLA-C*08:01; SMAD4; R361C; 0
YVDPSGGDC

SEQ ID NO: 20903 - protein, 9 aa, Homo sapiens
  Table A; HLA-C*08:02; SMAD4; R361C; 0
YVDPSGGDC

SEQ ID NO: 20904 - protein, 10 aa, Homo sapiens
  Table A; HLA-A*01:01; SMAD4; R361C; 1
YVDPSGGDCF

SEQ ID NO: 20905 - protein, 10 aa, Homo sapiens
  Table A; HLA-A*02:05; SMAD4; R361C; 0
YVDPSGGDCF

SEQ ID NO: 20906 - protein, 10 aa, Homo sapiens
  Table A; HLA-A*02:06; SMAD4; R361C; 0
YVDPSGGDCF

SEQ ID NO: 20907 - protein, 10 aa, Homo sapiens
  Table A; HLA-A*02:07; SMAD4; R361C; 0
YVDPSGGDCF

SEQ ID NO: 20908 - protein, 10 aa, Homo sapiens
  Table A; HLA-A*02:08; SMAD4; R361C; 0
YVDPSGGDCF

SEQ ID NO: 20909 - protein, 10 aa, Homo sapiens
  Table A; HLA-A*26:01; SMAD4; R361C; 0
YVDPSGGDCF

SEQ ID NO: 20910 - protein, 10 aa, Homo sapiens
  Table A; HLA-A*26:02; SMAD4; R361C; 0
YVDPSGGDCF

SEQ ID NO: 20911 - protein, 10 aa, Homo sapiens
  Table A; HLA-B*13:01; SMAD4; R361C; 0
YVDPSGGDCF

SEQ ID NO: 20912 - protein, 10 aa, Homo sapiens
  Table A; HLA-B*15:01; SMAD4; R361C; 1
YVDPSGGDCF

SEQ ID NO: 20913 - protein, 10 aa, Homo sapiens
  Table A; HLA-B*15:02; SMAD4; R361C; 0
YVDPSGGDCF

SEQ ID NO: 20914 - protein, 10 aa, Homo sapiens
  Table A; HLA-B*15:13; SMAD4; R361C; 0
YVDPSGGDCF

SEQ ID NO: 20915 - protein, 10 aa, Homo sapiens
  Table A; HLA-B*35:01; SMAD4; R361C; 1
YVDPSGGDCF

SEQ ID NO: 20916 - protein, 10 aa, Homo sapiens
  Table A; HLA-B*35:02; SMAD4; R361C; 0
YVDPSGGDCF

SEQ ID NO: 20917 - protein, 10 aa, Homo sapiens
  Table A; HLA-B*35:03; SMAD4; R361C; 0
YVDPSGGDCF

SEQ ID NO: 20918 - protein, 10 aa, Homo sapiens
  Table A; HLA-B*35:08; SMAD4; R361C; 0
YVDPSGGDCF

SEQ ID NO: 20919 - protein, 10 aa, Homo sapiens
  Table A; HLA-B*35:12; SMAD4; R361C; 0
YVDPSGGDCF

SEQ ID NO: 20920 - protein, 10 aa, Homo sapiens
  Table A; HLA-B*38:01; SMAD4; R361C; 0
YVDPSGGDCF

SEQ ID NO: 20921 - protein, 10 aa, Homo sapiens
  Table A; HLA-B*39:01; SMAD4; R361C; 0
YVDPSGGDCF

SEQ ID NO: 20922 - protein, 10 aa, Homo sapiens
  Table A; HLA-B*48:01; SMAD4; R361C; 0
YVDPSGGDCF

SEQ ID NO: 20923 - protein, 10 aa, Homo sapiens
  Table A; HLA-B*50:01; SMAD4; R361C; 0
YVDPSGGDCF

SEQ ID NO: 20924 - protein, 10 aa, Homo sapiens
  Table A; HLA-B*58:01; SMAD4; R361C; 0
YVDPSGGDCF

SEQ ID NO: 20925 - protein, 10 aa, Homo sapiens
  Table A; HLA-C*02:02; SMAD4; R361C; 0
YVDPSGGDCF

SEQ ID NO: 20926 - protein, 10 aa, Homo sapiens
  Table A; HLA-C*03:02; SMAD4; R361C; 0
YVDPSGGDCF

SEQ ID NO: 20927 - protein, 10 aa, Homo sapiens
  Table A; HLA-C*03:03; SMAD4; R361C; 1
YVDPSGGDCF

SEQ ID NO: 20928 - protein, 10 aa, Homo sapiens
  Table A; HLA-C*03:04; SMAD4; R361C; 1
YVDPSGGDCF

SEQ ID NO: 20929 - protein, 10 aa, Homo sapiens
  Table A; HLA-C*05:01; SMAD4; R361C; 1
YVDPSGGDCF

SEQ ID NO: 20930 - protein, 10 aa, Homo sapiens
  Table A; HLA-C*08:01; SMAD4; R361C; 0
YVDPSGGDCF

SEQ ID NO: 20931 - protein, 10 aa, Homo sapiens
  Table A; HLA-C*08:02; SMAD4; R361C; 0
YVDPSGGDCF

SEQ ID NO: 20932 - protein, 10 aa, Homo sapiens
  Table A; HLA-C*17:01; SMAD4; R361C; 0
YVDPSGGDCF

SEQ ID NO: 20933 - protein, 9 aa, Homo sapiens
  Table A; HLA-B*39:01; SMAD4; R361H; 0
YVDPSGGDH

SEQ ID NO: 20934 - protein, 10 aa, Homo sapiens
  Table A; HLA-A*01:01; SMAD4; R361H; 1
YVDPSGGDHF

SEQ ID NO: 20935 - protein, 10 aa, Homo sapiens
  Table A; HLA-A*02:05; SMAD4; R361H; 0
YVDPSGGDHF

SEQ ID NO: 20936 - protein, 10 aa, Homo sapiens
  Table A; HLA-A*02:06; SMAD4; R361H; 0
YVDPSGGDHF

SEQ ID NO: 20937 - protein, 10 aa, Homo sapiens
  Table A; HLA-A*02:07; SMAD4; R361H; 0
YVDPSGGDHF

SEQ ID NO: 20938 - protein, 10 aa, Homo sapiens
  Table A; HLA-A*26:02; SMAD4; R361H; 0
YVDPSGGDHF

SEQ ID NO: 20939 - protein, 10 aa, Homo sapiens
  Table A; HLA-B*13:01; SMAD4; R361H; 0
YVDPSGGDHF

SEQ ID NO: 20940 - protein, 10 aa, Homo sapiens
  Table A; HLA-B*15:01; SMAD4; R361H; 1
YVDPSGGDHF

SEQ ID NO: 20941 - protein, 10 aa, Homo sapiens
  Table A; HLA-B*15:02; SMAD4; R361H; 0
YVDPSGGDHF

SEQ ID NO: 20942 - protein, 10 aa, Homo sapiens
  Table A; HLA-B*15:13; SMAD4; R361H; 0
YVDPSGGDHF

SEQ ID NO: 20943 - protein, 10 aa, Homo sapiens
  Table A; HLA-B*35:01; SMAD4; R361H; 1
YVDPSGGDHF

SEQ ID NO: 20944 - protein, 10 aa, Homo sapiens
  Table A; HLA-B*35:02; SMAD4; R361H; 0
YVDPSGGDHF

SEQ ID NO: 20945 - protein, 10 aa, Homo sapiens
  Table A; HLA-B*35:03; SMAD4; R361H; 0
YVDPSGGDHF

SEQ ID NO: 20946 - protein, 10 aa, Homo sapiens
  Table A; HLA-B*35:08; SMAD4; R361H; 0
YVDPSGGDHF

SEQ ID NO: 20947 - protein, 10 aa, Homo sapiens
  Table A; HLA-B*35:12; SMAD4; R361H; 0
YVDPSGGDHF

SEQ ID NO: 20948 - protein, 10 aa, Homo sapiens
  Table A; HLA-B*38:01; SMAD4; R361H; 0
YVDPSGGDHF

SEQ ID NO: 20949 - protein, 10 aa, Homo sapiens
  Table A; HLA-B*39:01; SMAD4; R361H; 0
YVDPSGGDHF

SEQ ID NO: 20950 - protein, 10 aa, Homo sapiens
  Table A; HLA-B*48:01; SMAD4; R361H; 0
YVDPSGGDHF

SEQ ID NO: 20951 - protein, 10 aa, Homo sapiens
  Table A; HLA-B*58:01; SMAD4; R361H; 0
YVDPSGGDHF

SEQ ID NO: 20952 - protein, 10 aa, Homo sapiens
  Table A; HLA-C*02:02; SMAD4; R361H; 1
YVDPSGGDHF

SEQ ID NO: 20953 - protein, 10 aa, Homo sapiens
  Table A; HLA-C*03:02; SMAD4; R361H; 0
YVDPSGGDHF

SEQ ID NO: 20954 - protein, 10 aa, Homo sapiens
  Table A; HLA-C*03:04; SMAD4; R361H; 1
YVDPSGGDHF

SEQ ID NO: 20955 - protein, 10 aa, Homo sapiens
  Table A; HLA-C*04:01; SMAD4; R361H; 1
YVDPSGGDHF

SEQ ID NO: 20956 - protein, 10 aa, Homo sapiens
  Table A; HLA-C*05:01; SMAD4; R361H; 1
YVDPSGGDHF

SEQ ID NO: 20957 - protein, 10 aa, Homo sapiens
  Table A; HLA-C*08:01; SMAD4; R361H; 0
YVDPSGGDHF

SEQ ID NO: 20958 - protein, 10 aa, Homo sapiens
  Table A; HLA-C*08:02; SMAD4; R361H; 1
YVDPSGGDHF

SEQ ID NO: 20959 - protein, 10 aa, Homo sapiens
  Table A; HLA-C*17:01; SMAD4; R361H; 0
YVDPSGGDHF

SEQ ID NO: 20960 - protein, 11 aa, Homo sapiens
  Table A; HLA-A*02:01; SMAD4; R361H; 1
YVDPSGGDHFC

SEQ ID NO: 20961 - protein, 11 aa, Homo sapiens
  Table A; HLA-A*02:06; SMAD4; R361H; 0
YVDPSGGDHFC

SEQ ID NO: 20962 - protein, 8 aa, Homo sapiens
  Table A; HLA-B*08:01; EZH2; E745K; 1
YVGIKREM

SEQ ID NO: 20963 - protein, 8 aa, Homo sapiens
  Table A; HLA-A*03:01; SF3B1; R625H; 1
YVHNTTAR

SEQ ID NO: 20964 - protein, 8 aa, Homo sapiens
  Table A; HLA-A*26:01; SF3B1; R625H; 0
YVHNTTAR

SEQ ID NO: 20965 - protein, 8 aa, Homo sapiens
  Table A; HLA-A*26:03; SF3B1; R625H; 0
YVHNTTAR

SEQ ID NO: 20966 - protein, 8 aa, Homo sapiens
  Table A; HLA-A*31:01; SF3B1; R625H; 0
YVHNTTAR

SEQ ID NO: 20967 - protein, 8 aa, Homo sapiens
  Table A; HLA-A*33:01; SF3B1; R625H; 0
YVHNTTAR

SEQ ID NO: 20968 - protein, 8 aa, Homo sapiens
  Table A; HLA-A*33:03; SF3B1; R625H; 0
YVHNTTAR

SEQ ID NO: 20969 - protein, 8 aa, Homo sapiens
  Table A; HLA-A*68:01; SF3B1; R625H; 0
YVHNTTAR

SEQ ID NO: 20970 - protein, 8 aa, Homo sapiens
  Table A; HLA-A*68:02; SF3B1; R625H; 0
YVHNTTAR

SEQ ID NO: 20971 - protein, 8 aa, Homo sapiens
  Table A; HLA-B*08:01; SF3B1; R625H; 1
YVHNTTAR

SEQ ID NO: 20972 - protein, 8 aa, Homo sapiens
  Table A; HLA-B*27:05; SF3B1; R625H; 0
YVHNTTAR

SEQ ID NO: 20973 - protein, 8 aa, Homo sapiens
  Table A; HLA-B*46:01; SF3B1; R625H; 0
YVHNTTAR

SEQ ID NO: 20974 - protein, 8 aa, Homo sapiens
  Table A; HLA-B*48:01; SF3B1; R625H; 0
YVHNTTAR

SEQ ID NO: 20975 - protein, 8 aa, Homo sapiens
  Table A; HLA-B*54:01; SF3B1; R625H; 0
YVHNTTAR

SEQ ID NO: 20976 - protein, 9 aa, Homo sapiens
  Table A; HLA-A*02:03; SF3B1; R625H; 0
YVHNTTARA

SEQ ID NO: 20977 - protein, 9 aa, Homo sapiens
  Table A; HLA-A*02:05; SF3B1; R625H; 0
YVHNTTARA

SEQ ID NO: 20978 - protein, 9 aa, Homo sapiens
  Table A; HLA-A*02:08; SF3B1; R625H; 0
YVHNTTARA

SEQ ID NO: 20979 - protein, 9 aa, Homo sapiens
  Table A; HLA-A*26:03; SF3B1; R625H; 0
YVHNTTARA

SEQ ID NO: 20980 - protein, 9 aa, Homo sapiens
  Table A; HLA-A*68:02; SF3B1; R625H; 0
YVHNTTARA

SEQ ID NO: 20981 - protein, 9 aa, Homo sapiens
  Table A; HLA-B*50:01; SF3B1; R625H; 0
YVHNTTARA

SEQ ID NO: 20982 - protein, 9 aa, Homo sapiens
  Table A; HLA-B*54:01; SF3B1; R625H; 0
YVHNTTARA

SEQ ID NO: 20983 - protein, 10 aa, Homo sapiens
  Table A; HLA-A*25:01; SF3B1; R625H; 0
YVHNTTARAF

SEQ ID NO: 20984 - protein, 10 aa, Homo sapiens
  Table A; HLA-A*26:01; SF3B1; R625H; 0
YVHNTTARAF

SEQ ID NO: 20985 - protein, 10 aa, Homo sapiens
  Table A; HLA-A*26:03; SF3B1; R625H; 0
YVHNTTARAF

SEQ ID NO: 20986 - protein, 10 aa, Homo sapiens
  Table A; HLA-A*68:01; SF3B1; R625H; 0
YVHNTTARAF

SEQ ID NO: 20987 - protein, 10 aa, Homo sapiens
  Table A; HLA-A*68:02; SF3B1; R625H; 0
YVHNTTARAF

SEQ ID NO: 20988 - protein, 10 aa, Homo sapiens
  Table A; HLA-B*07:02; SF3B1; R625H; 1
YVHNTTARAF

SEQ ID NO: 20989 - protein, 10 aa, Homo sapiens
  Table A; HLA-B*08:01; SF3B1; R625H; 1
YVHNTTARAF

SEQ ID NO: 20990 - protein, 10 aa, Homo sapiens
  Table A; HLA-B*15:01; SF3B1; R625H; 1
YVHNTTARAF

SEQ ID NO: 20991 - protein, 10 aa, Homo sapiens
  Table A; HLA-B*15:02; SF3B1; R625H; 0
YVHNTTARAF

SEQ ID NO: 20992 - protein, 10 aa, Homo sapiens
  Table A; HLA-B*46:01; SF3B1; R625H; 0
YVHNTTARAF

SEQ ID NO: 20993 - protein, 10 aa, Homo sapiens
  Table A; HLA-B*57:01; SF3B1; R625H; 0
YVHNTTARAF

SEQ ID NO: 20994 - protein, 10 aa, Homo sapiens
  Table A; HLA-C*01:02; SF3B1; R625H; 0
YVHNTTARAF

SEQ ID NO: 20995 - protein, 10 aa, Homo sapiens
  Table A; HLA-C*02:02; SF3B1; R625H; 0
YVHNTTARAF

SEQ ID NO: 20996 - protein, 10 aa, Homo sapiens
  Table A; HLA-C*03:04; SF3B1; R625H; 1
YVHNTTARAF

SEQ ID NO: 20997 - protein, 10 aa, Homo sapiens
  Table A; HLA-C*08:01; SF3B1; R625H; 0
YVHNTTARAF

SEQ ID NO: 20998 - protein, 11 aa, Homo sapiens
  Table A; HLA-A*68:02; SF3B1; R625H; 0
YVHNTTARAFA

SEQ ID NO: 20999 - protein, 9 aa, Homo sapiens
  Table A; HLA-A*02:03; PIK3CA; N345K; 0
YVKLNIRDI

SEQ ID NO: 21000 - protein, 9 aa, Homo sapiens
  Table A; HLA-A*02:01; RHOA; Y42C; 1
YVPTVFENC

SEQ ID NO: 21001 - protein, 9 aa, Homo sapiens
  Table A; HLA-A*02:05; RHOA; Y42C; 0
YVPTVFENC

SEQ ID NO: 21002 - protein, 9 aa, Homo sapiens
  Table A; HLA-A*02:06; RHOA; Y42C; 0
YVPTVFENC

SEQ ID NO: 21003 - protein, 9 aa, Homo sapiens
  Table A; HLA-A*02:07; RHOA; Y42C; 0
YVPTVFENC

SEQ ID NO: 21004 - protein, 9 aa, Homo sapiens
  Table A; HLA-A*02:08; RHOA; Y42C; 0
YVPTVFENC

SEQ ID NO: 21005 - protein, 9 aa, Homo sapiens
  Table A; HLA-A*68:02; RHOA; Y42C; 0
YVPTVFENC

SEQ ID NO: 21006 - protein, 10 aa, Homo sapiens
  Table A; HLA-A*02:05; RHOA; Y42C; 0
YVPTVFENCV

SEQ ID NO: 21007 - protein, 10 aa, Homo sapiens
  Table A; HLA-A*68:02; RHOA; Y42C; 0
YVPTVFENCV

SEQ ID NO: 21008 - protein, 9 aa, Homo sapiens
  Table A; HLA-A*33:03; MAPK1; E322K; 0
YYDPSDKPI

SEQ ID NO: 21009 - protein, 9 aa, Homo sapiens
  Table A; HLA-B*35:02; MAPK1; E322K; 0
YYDPSDKPI

SEQ ID NO: 21010 - protein, 9 aa, Homo sapiens
  Table A; HLA-B*35:03; MAPK1; E322K; 1
YYDPSDKPI

SEQ ID NO: 21011 - protein, 9 aa, Homo sapiens
  Table A; HLA-B*38:01; MAPK1; E322K; 1
YYDPSDKPI

SEQ ID NO: 21012 - protein, 9 aa, Homo sapiens
  Table A; HLA-B*48:01; MAPK1; E322K; 0
YYDPSDKPI

SEQ ID NO: 21013 - protein, 9 aa, Homo sapiens
  Table A; HLA-C*04:01; MAPK1; E322K; 1
YYDPSDKPI

SEQ ID NO: 21014 - protein, 9 aa, Homo sapiens
  Table A; HLA-C*07:02; MAPK1; E322K; 1
YYDPSDKPI

SEQ ID NO: 21015 - protein, 9 aa, Homo sapiens
  Table A; HLA-C*08:02; MAPK1; E322K; 1
YYDPSDKPI

SEQ ID NO: 21016 - protein, 9 aa, Homo sapiens
  AACR GENIE Results; ACVR1_p.S290L; A2902
HYHEMGLLY

SEQ ID NO: 21017 - protein, 9 aa, Homo sapiens
  AACR GENIE Results; ACVR1_p.S290L; B1801
HEMGLLYDY

SEQ ID NO: 21018 - protein, 11 aa, Homo sapiens
  AACR GENIE Results; ACVR1_p.S290L; A0201
LLYDYLQLTTL

SEQ ID NO: 21019 - protein, 10 aa, Homo sapiens
  AACR GENIE Results; AKT2_p.D416N; A0301
SINWQNVVQK

SEQ ID NO: 21020 - protein, 10 aa, Homo sapiens
  AACR GENIE Results; AKT2_p.D416N; A1101
SINWQNVVQK

SEQ ID NO: 21021 - protein, 11 aa, Homo sapiens
  AACR GENIE Results; AKT2_p.D416N; A6801
LSINWQNVVQK

SEQ ID NO: 21022 - protein, 11 aa, Homo sapiens
  AACR GENIE Results; AKT2_p.D416N; A1101
LSINWQNVVQK

SEQ ID NO: 21023 - protein, 9 aa, Homo sapiens
  AACR GENIE Results; AKT2_p.D416N; A1101
INWQNVVQK

SEQ ID NO: 21024 - protein, 9 aa, Homo sapiens
  AACR GENIE Results; AKT3_p.R249S; A0101
FSEDRTSFY

SEQ ID NO: 21025 - protein, 10 aa, Homo sapiens
  AACR GENIE Results; AKT3_p.R249S; B1501
RVFSEDRTSF

SEQ ID NO: 21026 - protein, 10 aa, Homo sapiens
  AACR GENIE Results; AKT3_p.R249S; B5701
RVFSEDRTSF

SEQ ID NO: 21027 - protein, 10 aa, Homo sapiens
  AACR GENIE Results; AKT3_p.R249S; A3201
RVFSEDRTSF

SEQ ID NO: 21028 - protein, 9 aa, Homo sapiens
  AACR GENIE Results; AKT3_p.R249S; A2402
VFSEDRTSF

SEQ ID NO: 21029 - protein, 9 aa, Homo sapiens
  AACR GENIE Results; AKT3_p.R249S; A2301
VFSEDRTSF

SEQ ID NO: 21030 - protein, 10 aa, Homo sapiens
  AACR GENIE Results; AKT3_p.R249S; A2902
VFSEDRTSFY

SEQ ID NO: 21031 - protein, 9 aa, Homo sapiens
  AACR GENIE Results; AKT3_p.R249S; B1501
VFSEDRTSF

SEQ ID NO: 21032 - protein, 11 aa, Homo sapiens
  AACR GENIE Results; AKT3_p.R249S; A0301
RVFSEDRTSFY

SEQ ID NO: 21033 - protein, 8 aa, Homo sapiens
  AACR GENIE Results; AKT3_p.R249S; B1801
SEDRTSFY

SEQ ID NO: 21034 - protein, 9 aa, Homo sapiens
  AACR GENIE Results; AKT3_p.R249S; C1601
FSEDRTSFY

SEQ ID NO: 21035 - protein, 11 aa, Homo sapiens
  AACR GENIE Results; AKT3_p.R249S; A6801
TSFYGAEIVSA

SEQ ID NO: 21036 - protein, 9 aa, Homo sapiens
  AACR GENIE Results; AKT3_p.R249S; C1601
VFSEDRTSF

SEQ ID NO: 21037 - protein, 8 aa, Homo sapiens
  AACR GENIE Results; AKT3_p.R249S; C1601
FSEDRTSF

SEQ ID NO: 21038 - protein, 9 aa, Homo sapiens
  AACR GENIE Results; AKT3_p.R249S; C0202
FSEDRTSFY

SEQ ID NO: 21039 - protein, 9 aa, Homo sapiens
  AACR GENIE Results; ALK_p.A1280V; B2705
ARDIYRVSY

SEQ ID NO: 21040 - protein, 9 aa, Homo sapiens
  AACR GENIE Results; ALK_p.A1280V; A0201
GMARDIYRV

SEQ ID NO: 21041 - protein, 8 aa, Homo sapiens
  AACR GENIE Results; ALK_p.C154F; B1801
EEAILEGF

SEQ ID NO: 21042 - protein, 9 aa, Homo sapiens
  AACR GENIE Results; ALK_p.C154F; B4001
GEEAILEGF

SEQ ID NO: 21043 - protein, 9 aa, Homo sapiens
  AACR GENIE Results; ALK_p.C154F; C0304
FVGPPGEAA

SEQ ID NO: 21044 - protein, 9 aa, Homo sapiens
  AACR GENIE Results; ALK_p.C154F; A0201
FVGPPGEAA

SEQ ID NO: 21045 - protein, 9 aa, Homo sapiens
  AACR GENIE Results; ALK_p.G843R; C1601
AARGGGRAY

SEQ ID NO: 21046 - protein, 9 aa, Homo sapiens
  AACR GENIE Results; ALK_p.G843R; B1501
AARGGGRAY

SEQ ID NO: 21047 - protein, 11 aa, Homo sapiens
  AACR GENIE Results; ALK_p.P1398L; A2601
DVINTALLIEY

SEQ ID NO: 21048 - protein, 9 aa, Homo sapiens
  AACR GENIE Results; ALK_p.P1398L; A0201
LLIEYGPLV

SEQ ID NO: 21049 - protein, 8 aa, Homo sapiens
  AACR GENIE Results; ALK_p.R1181C; B1302
HQNIVCCI

SEQ ID NO: 21050 - protein, 9 aa, Homo sapiens
  AACR GENIE Results; ALK_p.R1181C; B3801
NHQNIVCCI

SEQ ID NO: 21051 - protein, 8 aa, Homo sapiens
  AACR GENIE Results; ALK_p.R41L; B3501
QPLEPLSY

SEQ ID NO: 21052 - protein, 8 aa, Homo sapiens
  AACR GENIE Results; APC_p.A1296Qfs*9; B1302
NQTTQEQI

SEQ ID NO: 21053 - protein, 9 aa, Homo sapiens
  AACR GENIE Results; APC_p.A1296Qfs*9; C1502
TTQEQILLI

SEQ ID NO: 21054 - protein, 9 aa, Homo sapiens
  AACR GENIE Results; APC_p.A1296Qfs*9; B3801
NQTTQEQIL

SEQ ID NO: 21055 - protein, 9 aa, Homo sapiens
  AACR GENIE Results; APC_p.A1492Cfs*22; C1502
YSRWIFLFI

SEQ ID NO: 21056 - protein, 10 aa, Homo sapiens
  AACR GENIE Results; APC_p.A1492Cfs*22; B2702
FIQPECSEPR

SEQ ID NO: 21057 - protein, 9 aa, Homo sapiens
  AACR GENIE Results; APC_p.A1492Cfs*22; A2301
KYSRWIFLF

SEQ ID NO: 21058 - protein, 9 aa, Homo sapiens
  AACR GENIE Results; APC_p.A1492Cfs*22; A3101
IQPECSEPR

SEQ ID NO: 21059 - protein, 9 aa, Homo sapiens
  AACR GENIE Results; APC_p.A1492Cfs*22; A6801
IQPECSEPR

SEQ ID NO: 21060 - protein, 9 aa, Homo sapiens
  AACR GENIE Results; APC_p.A1492Cfs*22; A1101
IQPECSEPR

SEQ ID NO: 21061 - protein, 8 aa, Homo sapiens
  AACR GENIE Results; APC_p.A1492Pfs*15; B3701
MDFLVHPA

SEQ ID NO: 21062 - protein, 9 aa, Homo sapiens
  AACR GENIE Results; APC_p.A1492Pfs*15; A0201
QMDFLVHPA

SEQ ID NO: 21063 - protein, 8 aa, Homo sapiens
  AACR GENIE Results; APC_p.A1492Pfs*15; B4002
MDFLVHPA

SEQ ID NO: 21064 - protein, 9 aa, Homo sapiens
  AACR GENIE Results; APC_p.A1492Pfs*15; B5001
QMDFLVHPA

SEQ ID NO: 21065 - protein, 9 aa, Homo sapiens
  AACR GENIE Results; APC_p.A1492Pfs*15; C1402
HFPRKVLQM

SEQ ID NO: 21066 - protein, 9 aa, Homo sapiens
  AACR GENIE Results; APC_p.A1492Pfs*15; A6802
QMDFLVHPA

SEQ ID NO: 21067 - protein, 8 aa, Homo sapiens
  AACR GENIE Results; APC_p.A1492Pfs*15; B1801
MDFLVHPA

SEQ ID NO: 21068 - protein, 8 aa, Homo sapiens
  AACR GENIE Results; APC_p.A1492Pfs*15; B5001
MDFLVHPA

SEQ ID NO: 21069 - protein, 10 aa, Homo sapiens
  AACR GENIE Results; APC_p.A1492Pfs*15; A3303
DADTLLHFPR

SEQ ID NO: 21070 - protein, 9 aa, Homo sapiens
  AACR GENIE Results; APC_p.D1486Ifs*21; A0201
QMDFLVHPA

SEQ ID NO: 21071 - protein, 8 aa, Homo sapiens
  AACR GENIE Results; APC_p.D1486Ifs*21; B3501
LPDAILYY

SEQ ID NO: 21072 - protein, 9 aa, Homo sapiens
  AACR GENIE Results; APC_p.D1486Ifs*21; C0602
LYYILPRKV

SEQ ID NO: 21073 - protein, 9 aa, Homo sapiens
  AACR GENIE Results; APC_p.D1486Ifs*21; A2902
VLPDAILYY

SEQ ID NO: 21074 - protein, 8 aa, Homo sapiens
  AACR GENIE Results; APC_p.D1486Ifs*21; B1801
MDFLVHPA

SEQ ID NO: 21075 - protein, 9 aa, Homo sapiens
  AACR GENIE Results; APC_p.D1486Ifs*21; A2301
YYILPRKVL

SEQ ID NO: 21076 - protein, 11 aa, Homo sapiens
  AACR GENIE Results; APC_p.D1562Gfs*5; A3101
KTIDSEKGPIR

SEQ ID NO: 21077 - protein, 11 aa, Homo sapiens
  AACR GENIE Results; APC_p.D1562Gfs*5; A1101
KTIDSEKGPIR

SEQ ID NO: 21078 - protein, 11 aa, Homo sapiens
  AACR GENIE Results; APC_p.D1562Gfs*5; A6801
KTIDSEKGPIR

SEQ ID NO: 21079 - protein, 11 aa, Homo sapiens
  AACR GENIE Results; APC_p.D1562Gfs*5; B5701
KTIDSEKGPIR

SEQ ID NO: 21080 - protein, 9 aa, Homo sapiens
  AACR GENIE Results; APC_p.D1562Gfs*5; C0802
TIDSEKGPI

SEQ ID NO: 21081 - protein, 8 aa, Homo sapiens
  AACR GENIE Results; APC_p.D170Vfs*4; B5701
LTKRIVFL

SEQ ID NO: 21082 - protein, 8 aa, Homo sapiens
  AACR GENIE Results; APC_p.D170Vfs*4; C1203
LTKRIVFL

SEQ ID NO: 21083 - protein, 9 aa, Homo sapiens
  AACR GENIE Results; APC_p.D842Vfs*18; A1101
GSLVLVLKK

SEQ ID NO: 21084 - protein, 9 aa, Homo sapiens
  AACR GENIE Results; APC_p.D842Vfs*18; B5701
LVLKKIEVW

SEQ ID NO: 21085 - protein, 8 aa, Homo sapiens
  AACR GENIE Results; APC_p.D842Vfs*18; A1101
GSLVLVLK

SEQ ID NO: 21086 - protein, 9 aa, Homo sapiens
  AACR GENIE Results; APC_p.D842Vfs*18; C0602
SRGSLVLVL

SEQ ID NO: 21087 - protein, 9 aa, Homo sapiens
  AACR GENIE Results; APC_p.D842Vfs*18; C0701
SRGSLVLVL

SEQ ID NO: 21088 - protein, 8 aa, Homo sapiens
  AACR GENIE Results; APC_p.D842Vfs*18; B5701
VLKKIEVW

SEQ ID NO: 21089 - protein, 9 aa, Homo sapiens
  AACR GENIE Results; APC_p.D842Vfs*18; B2705
SRGSLVLVL

SEQ ID NO: 21090 - protein, 9 aa, Homo sapiens
  AACR GENIE Results; APC_p.D842Vfs*18; C1502
SSSRGSLVL

SEQ ID NO: 21091 - protein, 11 aa, Homo sapiens
  AACR GENIE Results; APC_p.D842Vfs*18; A0301
SSRGSLVLVLK

SEQ ID NO: 21092 - protein, 9 aa, Homo sapiens
  AACR GENIE Results; APC_p.D842Vfs*18; A0301
GSLVLVLKK

SEQ ID NO: 21093 - protein, 11 aa, Homo sapiens
  AACR GENIE Results; APC_p.E1309Kfs*12; A3303
NTLQIAEIKKR

SEQ ID NO: 21094 - protein, 10 aa, Homo sapiens
  AACR GENIE Results; APC_p.E1309Kfs*12; A6801
NTLQIAEIKK

SEQ ID NO: 21095 - protein, 9 aa, Homo sapiens
  AACR GENIE Results; APC_p.E1309Kfs*12; B2705
KRLELGQLK

SEQ ID NO: 21096 - protein, 9 aa, Homo sapiens
  AACR GENIE Results; APC_p.E1309Kfs*12; B4002
AEIKKRLEL

SEQ ID NO: 21097 - protein, 10 aa, Homo sapiens
  AACR GENIE Results; APC_p.E1309Kfs*12; A1101
NTLQIAEIKK

SEQ ID NO: 21098 - protein, 9 aa, Homo sapiens
  AACR GENIE Results; APC_p.E1309Kfs*12; A6802
QIAEIKKRL

SEQ ID NO: 21099 - protein, 9 aa, Homo sapiens
  AACR GENIE Results; APC_p.E1309Kfs*5; B5701
QIAEIKKDW

SEQ ID NO: 21100 - protein, 10 aa, Homo sapiens
  AACR GENIE Results; APC_p.E1309Kfs*5; A6801
NTLQIAEIKK

SEQ ID NO: 21101 - protein, 9 aa, Homo sapiens
  AACR GENIE Results; APC_p.E1309Kfs*5; B4403
QIAEIKKDW

SEQ ID NO: 21102 - protein, 10 aa, Homo sapiens
  AACR GENIE Results; APC_p.E1309Rfs*6; A6801
NTLQIAEIKR

SEQ ID NO: 21103 - protein, 9 aa, Homo sapiens
  AACR GENIE Results; APC_p.E1353Dfs*62; A0201
CLADVLLSV

SEQ ID NO: 21104 - protein, 11 aa, Homo sapiens
  AACR GENIE Results; APC_p.E1353Dfs*62; B5701
APFRVNHAVEW

SEQ ID NO: 21105 - protein, 9 aa, Homo sapiens
  AACR GENIE Results; APC_p.E1353Dfs*62; B5101
DVLLSVHLI

SEQ ID NO: 21106 - protein, 9 aa, Homo sapiens
  AACR GENIE Results; APC_p.E1353Dfs*62; B4901
QERNLPPKV

SEQ ID NO: 21107 - protein, 9 aa, Homo sapiens
  AACR GENIE Results; APC_p.E1353Dfs*62; B1302
CLADVLLSV

SEQ ID NO: 21108 - protein, 9 aa, Homo sapiens
  AACR GENIE Results; APC_p.E1353Dfs*62; A3001
QERNLPPKV

SEQ ID NO: 21109 - protein, 9 aa, Homo sapiens
  AACR GENIE Results; APC_p.E1353Dfs*62; A6802
SVHLIVLRV

SEQ ID NO: 21110 - protein, 9 aa, Homo sapiens
  AACR GENIE Results; APC_p.E1353Dfs*62; A3101
VVRLPAPFR

SEQ ID NO: 21111 - protein, 9 aa, Homo sapiens
  AACR GENIE Results; APC_p.E1353Dfs*62; A3101
KAVDFLQER

SEQ ID NO: 21112 - protein, 9 aa, Homo sapiens
  AACR GENIE Results; APC_p.E1353Dfs*62; C1502
SVHLIVLRV

SEQ ID NO: 21113 - protein, 9 aa, Homo sapiens
  AACR GENIE Results; APC_p.E1353Dfs*62; C0602
FRVNHAVEW

SEQ ID NO: 21114 - protein, 8 aa, Homo sapiens
  AACR GENIE Results; APC_p.E1353Dfs*62; B5701
RVNHAVEW

SEQ ID NO: 21115 - protein, 9 aa, Homo sapiens
  AACR GENIE Results; APC_p.E1353Dfs*62; B3701
ADVLLSVHL

SEQ ID NO: 21116 - protein, 9 aa, Homo sapiens
  AACR GENIE Results; APC_p.E1353Dfs*62; B4002
ADVLLSVHL

SEQ ID NO: 21117 - protein, 9 aa, Homo sapiens
  AACR GENIE Results; APC_p.E1353Dfs*62; C0602
VRLPAPFRV

SEQ ID NO: 21118 - protein, 9 aa, Homo sapiens
  AACR GENIE Results; APC_p.E1353Dfs*62; B0702
HPKVHLNTM

SEQ ID NO: 21119 - protein, 9 aa, Homo sapiens
  AACR GENIE Results; APC_p.E1353Dfs*62; B4002
QERNLPPKV

SEQ ID NO: 21120 - protein, 9 aa, Homo sapiens
  AACR GENIE Results; APC_p.E1353Dfs*62; B1302
SVHLIVLRV

SEQ ID NO: 21121 - protein, 11 aa, Homo sapiens
  AACR GENIE Results; APC_p.E1353Dfs*62; B4002
QERNLPPKVVL

SEQ ID NO: 21122 - protein, 9 aa, Homo sapiens
  AACR GENIE Results; APC_p.E1353Dfs*62; A0205
CLADVLLSV

SEQ ID NO: 21123 - protein, 9 aa, Homo sapiens
  AACR GENIE Results; APC_p.E1353Dfs*62; A6802
DVLLSVHLI

SEQ ID NO: 21124 - protein, 9 aa, Homo sapiens
  AACR GENIE Results; APC_p.E1353Dfs*62; B5701
RVVRLPAPF

SEQ ID NO: 21125 - protein, 9 aa, Homo sapiens
  AACR GENIE Results; APC_p.E1353Dfs*62; B0801
HPKVHLNTM

SEQ ID NO: 21126 - protein, 8 aa, Homo sapiens
  AACR GENIE Results; APC_p.E1353Dfs*62; B0801
NLPPKVVL

SEQ ID NO: 21127 - protein, 8 aa, Homo sapiens
  AACR GENIE Results; APC_p.E1353Dfs*62; A3101
SVHLIVLR

SEQ ID NO: 21128 - protein, 9 aa, Homo sapiens
  AACR GENIE Results; APC_p.E1353Dfs*62; B5701
KAVDFLQER

SEQ ID NO: 21129 - protein, 10 aa, Homo sapiens
  AACR GENIE Results; APC_p.E1353Dfs*62; A3101
RNLPPKVVLR

SEQ ID NO: 21130 - protein, 9 aa, Homo sapiens
  AACR GENIE Results; APC_p.E1353Dfs*62; A3303
KAVDFLQER

SEQ ID NO: 21131 - protein, 9 aa, Homo sapiens
  AACR GENIE Results; APC_p.E1353Dfs*62; C0702
FRVNHAVEW

SEQ ID NO: 21132 - protein, 9 aa, Homo sapiens
  AACR GENIE Results; APC_p.E1353Dfs*62; A0301
VVRLPAPFR

SEQ ID NO: 21133 - protein, 9 aa, Homo sapiens
  AACR GENIE Results; APC_p.E1353Dfs*62; A0201
FLQERNLPP

SEQ ID NO: 21134 - protein, 8 aa, Homo sapiens
  AACR GENIE Results; APC_p.E1353Dfs*62; A3303
SVHLIVLR

SEQ ID NO: 21135 - protein, 9 aa, Homo sapiens
  AACR GENIE Results; APC_p.E1353Dfs*62; A6801
KAVDFLQER

SEQ ID NO: 21136 - protein, 9 aa, Homo sapiens
  AACR GENIE Results; APC_p.E1353Dfs*62; B2705
FRVNHAVEW

SEQ ID NO: 21137 - protein, 8 aa, Homo sapiens
  AACR GENIE Results; APC_p.E1353Dfs*62; B5501
APFRVNHA

SEQ ID NO: 21138 - protein, 8 aa, Homo sapiens
  AACR GENIE Results; APC_p.E1353Vfs*21; B4403
SEISLQKW

SEQ ID NO: 21139 - protein, 9 aa, Homo sapiens
  AACR GENIE Results; APC_p.E1353Vfs*21; C1402
VFFRSEISL

SEQ ID NO: 21140 - protein, 8 aa, Homo sapiens
  AACR GENIE Results; APC_p.E1353Vfs*21; B4402
SEISLQKW

SEQ ID NO: 21141 - protein, 9 aa, Homo sapiens
  AACR GENIE Results; APC_p.E1353Vfs*21; B5701
RSEISLQKW

SEQ ID NO: 21142 - protein, 9 aa, Homo sapiens
  AACR GENIE Results; APC_p.E1353Vfs*21; B5801
RSEISLQKW

SEQ ID NO: 21143 - protein, 9 aa, Homo sapiens
  AACR GENIE Results; APC_p.E1353Vfs*21; B2705
FRSEISLQK

SEQ ID NO: 21144 - protein, 8 aa, Homo sapiens
  AACR GENIE Results; APC_p.E1353Vfs*21; A2301
SEISLQKW

SEQ ID NO: 21145 - protein, 8 aa, Homo sapiens
  AACR GENIE Results; APC_p.E1353Vfs*21; B4002
SEISLQKW

SEQ ID NO: 21146 - protein, 9 aa, Homo sapiens
  AACR GENIE Results; APC_p.E1353Vfs*21; B2702
FRSEISLQK

SEQ ID NO: 21147 - protein, 8 aa, Homo sapiens
  AACR GENIE Results; APC_p.E1353Vfs*21; B5801
SEISLQKW

SEQ ID NO: 21148 - protein, 10 aa, Homo sapiens
  AACR GENIE Results; APC_p.E1464Vfs*8; B0702
APTAEKRVDL

SEQ ID NO: 21149 - protein, 9 aa, Homo sapiens
  AACR GENIE Results; APC_p.E1494Kfs*13; A3301
DTLLHFATK

SEQ ID NO: 21150 - protein, 9 aa, Homo sapiens
  AACR GENIE Results; APC_p.E1494Kfs*13; A0201
QMDFLVHPA

SEQ ID NO: 21151 - protein, 8 aa, Homo sapiens
  AACR GENIE Results; APC_p.E1494Kfs*13; B3701
MDFLVHPA

SEQ ID NO: 21152 - protein, 9 aa, Homo sapiens
  AACR GENIE Results; APC_p.E1494Kfs*13; A3303
DTLLHFATK

SEQ ID NO: 21153 - protein, 9 aa, Homo sapiens
  AACR GENIE Results; APC_p.E1494Kfs*13; B5701
ATKVLQMDF

SEQ ID NO: 21154 - protein, 9 aa, Homo sapiens
  AACR GENIE Results; APC_p.E1494Kfs*13; C1402
HFATKVLQM

SEQ ID NO: 21155 - protein, 9 aa, Homo sapiens
  AACR GENIE Results; APC_p.E1494Kfs*13; A0205
QMDFLVHPA

SEQ ID NO: 21156 - protein, 9 aa, Homo sapiens
  AACR GENIE Results; APC_p.E1494Kfs*13; B5001
QMDFLVHPA

SEQ ID NO: 21157 - protein, 8 aa, Homo sapiens
  AACR GENIE Results; APC_p.E1494Kfs*13; B4002
MDFLVHPA

SEQ ID NO: 21158 - protein, 9 aa, Homo sapiens
  AACR GENIE Results; APC_p.E1494Kfs*13; A6802
QMDFLVHPA

SEQ ID NO: 21159 - protein, 9 aa, Homo sapiens
  AACR GENIE Results; APC_p.E1494Kfs*13; A6801
DTLLHFATK

SEQ ID NO: 21160 - protein, 9 aa, Homo sapiens
  AACR GENIE Results; APC_p.E1494Kfs*13; A1101
DTLLHFATK

SEQ ID NO: 21161 - protein, 10 aa, Homo sapiens
  AACR GENIE Results; APC_p.E1494Kfs*13; B5001
LQMDFLVHPA

SEQ ID NO: 21162 - protein, 9 aa, Homo sapiens
  AACR GENIE Results; APC_p.E1494Kfs*13; B1501
ATKVLQMDF

SEQ ID NO: 21163 - protein, 10 aa, Homo sapiens
  AACR GENIE Results; APC_p.E1494Kfs*13; A0201
LQMDFLVHPA

SEQ ID NO: 21164 - protein, 8 aa, Homo sapiens
  AACR GENIE Results; APC_p.E1494Kfs*13; B1801
MDFLVHPA

SEQ ID NO: 21165 - protein, 8 aa, Homo sapiens
  AACR GENIE Results; APC_p.E1494Kfs*13; B5001
MDFLVHPA

SEQ ID NO: 21166 - protein, 9 aa, Homo sapiens
  AACR GENIE Results; APC_p.E1494Vfs*12; A0201
QMDFLVHPA

SEQ ID NO: 21167 - protein, 9 aa, Homo sapiens
  AACR GENIE Results; APC_p.E1494Vfs*12; B5101
DTLLHFATV

SEQ ID NO: 21168 - protein, 8 aa, Homo sapiens
  AACR GENIE Results; APC_p.E1494Vfs*12; B1801
MDFLVHPA

SEQ ID NO: 21169 - protein, 9 aa, Homo sapiens
  AACR GENIE Results; APC_p.E1494Vfs*12; A3101
QMDFLVHPA

SEQ ID NO: 21170 - protein, 9 aa, Homo sapiens
  AACR GENIE Results; APC_p.E1494Vfs*12; B3501
FATVLQMDF

SEQ ID NO: 21171 - protein, 9 aa, Homo sapiens
  AACR GENIE Results; APC_p.E1494Vfs*12; C1601
FATVLQMDF

SEQ ID NO: 21172 - protein, 9 aa, Homo sapiens
  AACR GENIE Results; APC_p.E403Kfs*51; A3101
TVKPVGSGR

SEQ ID NO: 21173 - protein, 9 aa, Homo sapiens
  AACR GENIE Results; APC_p.E403Kfs*51; A6801
TVKPVGSGR

SEQ ID NO: 21174 - protein, 9 aa, Homo sapiens
  AACR GENIE Results; APC_p.E403Kfs*51; B1302
IQCQLLLNI

SEQ ID NO: 21175 - protein, 9 aa, Homo sapiens
  AACR GENIE Results; APC_p.E403Kfs*51; B0702
KPVGSGRKL

SEQ ID NO: 21176 - protein, 8 aa, Homo sapiens
  AACR GENIE Results; APC_p.E403Kfs*51; B5101
YALTVKPV

SEQ ID NO: 21177 - protein, 10 aa, Homo sapiens
  AACR GENIE Results; APC_p.E403Kfs*51; A6801
LTVKPVGSGR

SEQ ID NO: 21178 - protein, 9 aa, Homo sapiens
  AACR GENIE Results; APC_p.E403Kfs*51; C0602
IRSVLLCVF

SEQ ID NO: 21179 - protein, 9 aa, Homo sapiens
  AACR GENIE Results; APC_p.E403Kfs*51; A0301
TVKPVGSGR

SEQ ID NO: 21180 - protein, 9 aa, Homo sapiens
  AACR GENIE Results; APC_p.E403Kfs*51; B2705
TRTKIQCQL

SEQ ID NO: 21181 - protein, 10 aa, Homo sapiens
  AACR GENIE Results; APC_p.E403Kfs*51; A0301
TVKPVGSGRK

SEQ ID NO: 21182 - protein, 8 aa, Homo sapiens
  AACR GENIE Results; APC_p.E403Kfs*51; B0801
LLNIRSVL

SEQ ID NO: 21183 - protein, 9 aa, Homo sapiens
  AACR GENIE Results; APC_p.E403Kfs*51; C0701
RRKSESFIF

SEQ ID NO: 21184 - protein, 10 aa, Homo sapiens
  AACR GENIE Results; APC_p.E403Kfs*51; A0201
LLLNIRSVLL

SEQ ID NO: 21185 - protein, 9 aa, Homo sapiens
  AACR GENIE Results; APC_p.E403Kfs*51; A1101
TVKPVGSGR

SEQ ID NO: 21186 - protein, 9 aa, Homo sapiens
  AACR GENIE Results; APC_p.E403Kfs*51; A3001
TVKPVGSGR

SEQ ID NO: 21187 - protein, 8 aa, Homo sapiens
  AACR GENIE Results; APC_p.E403Kfs*51; B5701
KSESFIFW

SEQ ID NO: 21188 - protein, 9 aa, Homo sapiens
  AACR GENIE Results; APC_p.E403Kfs*51; C0702
IRSVLLCVF

SEQ ID NO: 21189 - protein, 10 aa, Homo sapiens
  AACR GENIE Results; APC_p.E403Kfs*51; A3101
LTVKPVGSGR

SEQ ID NO: 21190 - protein, 10 aa, Homo sapiens
  AACR GENIE Results; APC_p.E403Kfs*51; A1101
LTVKPVGSGR

SEQ ID NO: 21191 - protein, 11 aa, Homo sapiens
  AACR GENIE Results; APC_p.F1396Lfs*19; B5701
APFRVNHAVEW

SEQ ID NO: 21192 - protein, 9 aa, Homo sapiens
  AACR GENIE Results; APC_p.F1396Lfs*19; A3101
VVRLPAPFR

SEQ ID NO: 21193 - protein, 9 aa, Homo sapiens
  AACR GENIE Results; APC_p.F1396Lfs*19; C0602
FRVNHAVEW

SEQ ID NO: 21194 - protein, 8 aa, Homo sapiens
  AACR GENIE Results; APC_p.F1396Lfs*19; B5701
RVNHAVEW

SEQ ID NO: 21195 - protein, 10 aa, Homo sapiens
  AACR GENIE Results; APC_p.F1396Lfs*19; A3101
SSLDSLRVVR

SEQ ID NO: 21196 - protein, 9 aa, Homo sapiens
  AACR GENIE Results; APC_p.F1396Lfs*19; C1502
SSLDSLRVV

SEQ ID NO: 21197 - protein, 9 aa, Homo sapiens
  AACR GENIE Results; APC_p.F1396Lfs*19; B5701
RVVRLPAPF

SEQ ID NO: 21198 - protein, 9 aa, Homo sapiens
  AACR GENIE Results; APC_p.F1396Lfs*19; C0602
VRLPAPFRV

SEQ ID NO: 21199 - protein, 9 aa, Homo sapiens
  AACR GENIE Results; APC_p.F1396Lfs*19; C0702
FRVNHAVEW

SEQ ID NO: 21200 - protein, 9 aa, Homo sapiens
  AACR GENIE Results; APC_p.F1396Lfs*19; C1203
SSLDSLRVV

SEQ ID NO: 21201 - protein, 9 aa, Homo sapiens
  AACR GENIE Results; APC_p.F1396Lfs*19; A6801
SVSSLDSLR

SEQ ID NO: 21202 - protein, 9 aa, Homo sapiens
  AACR GENIE Results; APC_p.F1396Lfs*19; A3101
SLDSLRVVR

SEQ ID NO: 21203 - protein, 9 aa, Homo sapiens
  AACR GENIE Results; APC_p.F1396Lfs*19; A0301
VVRLPAPFR

SEQ ID NO: 21204 - protein, 9 aa, Homo sapiens
  AACR GENIE Results; APC_p.F1396Lfs*19; B2705
FRVNHAVEW

SEQ ID NO: 21205 - protein, 9 aa, Homo sapiens
  AACR GENIE Results; APC_p.F1396Lfs*19; C0602
SSLDSLRVV

SEQ ID NO: 21206 - protein, 9 aa, Homo sapiens
  AACR GENIE Results; APC_p.F1491Lfs*16; A0201
QMDFLVHPA

SEQ ID NO: 21207 - protein, 10 aa, Homo sapiens
  AACR GENIE Results; APC_p.F1491Lfs*16; B3503
LPDADTLLHL

SEQ ID NO: 21208 - protein, 8 aa, Homo sapiens
  AACR GENIE Results; APC_p.F1491Lfs*16; B4002
MDFLVHPA

SEQ ID NO: 21209 - protein, 8 aa, Homo sapiens
  AACR GENIE Results; APC_p.F1491Lfs*16; B5101
DADTLLHL

SEQ ID NO: 21210 - protein, 9 aa, Homo sapiens
  AACR GENIE Results; APC_p.F1491Lfs*16; A6802
QMDFLVHPA

SEQ ID NO: 21211 - protein, 10 aa, Homo sapiens
  AACR GENIE Results; APC_p.F1491Lfs*16; B2702
DADTLLHLPR

SEQ ID NO: 21212 - protein, 8 aa, Homo sapiens
  AACR GENIE Results; APC_p.F1491Lfs*16; B1801
MDFLVHPA

SEQ ID NO: 21213 - protein, 9 aa, Homo sapiens
  AACR GENIE Results; APC_p.G1428Dfs*45; B1501
KQLKPSEKY

SEQ ID NO: 21214 - protein, 9 aa, Homo sapiens
  AACR GENIE Results; APC_p.G1428Dfs*45; A2301
KYLKIKHLL

SEQ ID NO: 21215 - protein, 10 aa, Homo sapiens
  AACR GENIE Results; APC_p.G1428Dfs*45; A2301
KYLKIKHLLL

SEQ ID NO: 21216 - protein, 9 aa, Homo sapiens
  AACR GENIE Results; APC_p.G1428Dfs*45; B4403
AEVKHLHHL

SEQ ID NO: 21217 - protein, 9 aa, Homo sapiens
  AACR GENIE Results; APC_p.G1428Dfs*45; B0702
KPSEKYLKI

SEQ ID NO: 21218 - protein, 9 aa, Homo sapiens
  AACR GENIE Results; APC_p.H1490Lfs*17; B3503
LPDADTLLL

SEQ ID NO: 21219 - protein, 9 aa, Homo sapiens
  AACR GENIE Results; APC_p.H1490Lfs*17; A0201
QMDFLVHPA

SEQ ID NO: 21220 - protein, 8 aa, Homo sapiens
  AACR GENIE Results; APC_p.H1490Lfs*17; B4002
MDFLVHPA

SEQ ID NO: 21221 - protein, 9 aa, Homo sapiens
  AACR GENIE Results; APC_p.H1490Lfs*17; A6802
QMDFLVHPA

SEQ ID NO: 21222 - protein, 9 aa, Homo sapiens
  AACR GENIE Results; APC_p.H1490Lfs*17; B3501
LPDADTLLL

SEQ ID NO: 21223 - protein, 10 aa, Homo sapiens
  AACR GENIE Results; APC_p.H1490Lfs*17; B2702
DADTLLLLPR

SEQ ID NO: 21224 - protein, 10 aa, Homo sapiens
  AACR GENIE Results; APC_p.H1490Lfs*17; B3503
LPDADTLLLL

SEQ ID NO: 21225 - protein, 8 aa, Homo sapiens
  AACR GENIE Results; APC_p.H1490Lfs*17; B1801
MDFLVHPA

SEQ ID NO: 21226 - protein, 10 aa, Homo sapiens
  AACR GENIE Results; APC_p.I1307Nfs*8; A6801
NTLQIAENKR

SEQ ID NO: 21227 - protein, 9 aa, Homo sapiens
  AACR GENIE Results; APC_p.I1307Nfs*8; A1101
NTLQIAENK

SEQ ID NO: 21228 - protein, 9 aa, Homo sapiens
  AACR GENIE Results; APC_p.I1307Nfs*8; A6801
NTLQIAENK

SEQ ID NO: 21229 - protein, 11 aa, Homo sapiens
  AACR GENIE Results; APC_p.I1307Nfs*8; A6801
DSANTLQIAEN

SEQ ID NO: 21230 - protein, 11 aa, Homo sapiens
  AACR GENIE Results; APC_p.I1307Nfs*8; A1101
SANTLQIAENK

SEQ ID NO: 21231 - protein, 9 aa, Homo sapiens
  AACR GENIE Results; APC_p.I1311Lfs*10; B4001
AEIKEKLEL

SEQ ID NO: 21232 - protein, 9 aa, Homo sapiens
  AACR GENIE Results; APC_p.I1311Lfs*10; B4403
AEIKEKLEL

SEQ ID NO: 21233 - protein, 8 aa, Homo sapiens
  AACR GENIE Results; APC_p.I1311Lfs*10; B0801
EIKEKLEL

SEQ ID NO: 21234 - protein, 9 aa, Homo sapiens
  AACR GENIE Results; APC_p.I1311Lfs*10; B4402
AEIKEKLEL

SEQ ID NO: 21235 - protein, 9 aa, Homo sapiens
  AACR GENIE Results; APC_p.K1310Dfs*4; B5801
QIAEIKEDW

SEQ ID NO: 21236 - protein, 9 aa, Homo sapiens
  AACR GENIE Results; APC_p.K1310Dfs*4; B5701
QIAEIKEDW

SEQ ID NO: 21237 - protein, 9 aa, Homo sapiens
  AACR GENIE Results; APC_p.K1310Dfs*4; B4403
QIAEIKEDW

SEQ ID NO: 21238 - protein, 9 aa, Homo sapiens
  AACR GENIE Results; APC_p.K1310Dfs*4; B3501
QIAEIKEDW

SEQ ID NO: 21239 - protein, 9 aa, Homo sapiens
  AACR GENIE Results; APC_p.K1310Dfs*4; B2702
QIAEIKEDW

SEQ ID NO: 21240 - protein, 9 aa, Homo sapiens
  AACR GENIE Results; APC_p.K1310Rfs*11; A0205
QIAEIKERL

SEQ ID NO: 21241 - protein, 11 aa, Homo sapiens
  AACR GENIE Results; APC_p.K1310Rfs*11; A3301
NTLQIAEIKER

SEQ ID NO: 21242 - protein, 9 aa, Homo sapiens
  AACR GENIE Results; APC_p.K1310Rfs*11; B4001
AEIKERLEL

SEQ ID NO: 21243 - protein, 9 aa, Homo sapiens
  AACR GENIE Results; APC_p.K1310Rfs*11; B4403
AEIKERLEL

SEQ ID NO: 21244 - protein, 9 aa, Homo sapiens
  AACR GENIE Results; APC_p.K1310Rfs*11; B4002
AEIKERLEL

SEQ ID NO: 21245 - protein, 9 aa, Homo sapiens
  AACR GENIE Results; APC_p.K1310Rfs*11; A6802
QIAEIKERL

SEQ ID NO: 21246 - protein, 11 aa, Homo sapiens
  AACR GENIE Results; APC_p.K1310Rfs*11; A3303
NTLQIAEIKER

SEQ ID NO: 21247 - protein, 9 aa, Homo sapiens
  AACR GENIE Results; APC_p.K1310Rfs*11; B5001
QIAEIKERL

SEQ ID NO: 21248 - protein, 9 aa, Homo sapiens
  AACR GENIE Results; APC_p.K1310Rfs*11; B4901
AEIKERLEL

SEQ ID NO: 21249 - protein, 11 aa, Homo sapiens
  AACR GENIE Results; APC_p.K1310Rfs*11; A6801
NTLQIAEIKER

SEQ ID NO: 21250 - protein, 9 aa, Homo sapiens
  AACR GENIE Results; APC_p.K1310Rfs*11; B3801
QIAEIKERL

SEQ ID NO: 21251 - protein, 9 aa, Homo sapiens
  AACR GENIE Results; APC_p.K1310Rfs*11; A3001
AEIKERLEL

SEQ ID NO: 21252 - protein, 9 aa, Homo sapiens
  AACR GENIE Results; APC_p.K1310Rfs*11; B4002
LELGQLKIL

SEQ ID NO: 21253 - protein, 9 aa, Homo sapiens
  AACR GENIE Results; APC_p.K1310Rfs*11; B0702
AEIKERLEL

SEQ ID NO: 21254 - protein, 9 aa, Homo sapiens
  AACR GENIE Results; APC_p.K1449Sfs*24; A2301
KYLKIKHLL

SEQ ID NO: 21255 - protein, 9 aa, Homo sapiens
  AACR GENIE Results; APC_p.K1449Sfs*24; B1501
QTAQTSEKY

SEQ ID NO: 21256 - protein, 11 aa, Homo sapiens
  AACR GENIE Results; APC_p.K1449Sfs*24; A1101
QTAQTSEKYLK

SEQ ID NO: 21257 - protein, 10 aa, Homo sapiens
  AACR GENIE Results; APC_p.K1449Sfs*24; A2301
KYLKIKHLLL

SEQ ID NO: 21258 - protein, 9 aa, Homo sapiens
  AACR GENIE Results; APC_p.K1449Sfs*24; A1101
AQTSEKYLK

SEQ ID NO: 21259 - protein, 9 aa, Homo sapiens
  AACR GENIE Results; APC_p.K1449Sfs*24; A0101
QTAQTSEKY

SEQ ID NO: 21260 - protein, 10 aa, Homo sapiens
  AACR GENIE Results; APC_p.K1449Sfs*24; A1101
TAQTSEKYLK

SEQ ID NO: 21261 - protein, 9 aa, Homo sapiens
  AACR GENIE Results; APC_p.K1449Sfs*24; C1502
QTSEKYLKI

SEQ ID NO: 21262 - protein, 9 aa, Homo sapiens
  AACR GENIE Results; APC_p.K1449Sfs*24; B1302
QTSEKYLKI

SEQ ID NO: 21263 - protein, 9 aa, Homo sapiens
  AACR GENIE Results; APC_p.K1449Sfs*24; A6801
QTSEKYLKI

SEQ ID NO: 21264 - protein, 8 aa, Homo sapiens
  AACR GENIE Results; APC_p.K1449Sfs*24; A2301
KYLKIKHL

SEQ ID NO: 21265 - protein, 11 aa, Homo sapiens
  AACR GENIE Results; APC_p.L1302Rfs*3; A6801
TTQEADSANTR

SEQ ID NO: 21266 - protein, 11 aa, Homo sapiens
  AACR GENIE Results; APC_p.L1302Rfs*3; A3303
TTQEADSANTR

SEQ ID NO: 21267 - protein, 11 aa, Homo sapiens
  AACR GENIE Results; APC_p.L1302Rfs*3; A3301
TTQEADSANTR

SEQ ID NO: 21268 - protein, 11 aa, Homo sapiens
  AACR GENIE Results; APC_p.L1302Rfs*3; A3101
TTQEADSANTR

SEQ ID NO: 21269 - protein, 11 aa, Homo sapiens
  AACR GENIE Results; APC_p.L1302Rfs*3; A1101
TTQEADSANTR

SEQ ID NO: 21270 - protein, 9 aa, Homo sapiens
  AACR GENIE Results; APC_p.L1488Ffs*23; C1502
YSRWIFLFI

SEQ ID NO: 21271 - protein, 9 aa, Homo sapiens
  AACR GENIE Results; APC_p.L1488Ffs*23; A2301
KYSRWIFLF

SEQ ID NO: 21272 - protein, 9 aa, Homo sapiens
  AACR GENIE Results; APC_p.L1488Ffs*23; A3101
IQPECSEPR

SEQ ID NO: 21273 - protein, 9 aa, Homo sapiens
  AACR GENIE Results; APC_p.L1488Ffs*23; A6801
IQPECSEPR

SEQ ID NO: 21274 - protein, 9 aa, Homo sapiens
  AACR GENIE Results; APC_p.L1488Ffs*23; A1101
IQPECSEPR

SEQ ID NO: 21275 - protein, 9 aa, Homo sapiens
  AACR GENIE Results; APC_p.L1488Yfs*18; A0201
QMDFLVHPA

SEQ ID NO: 21276 - protein, 9 aa, Homo sapiens
  AACR GENIE Results; APC_p.L1488Yfs*18; B3501
LPDADTYIL

SEQ ID NO: 21277 - protein, 9 aa, Homo sapiens
  AACR GENIE Results; APC_p.L1488Yfs*18; B5101
DTYILPRKV

SEQ ID NO: 21278 - protein, 9 aa, Homo sapiens
  AACR GENIE Results; APC_p.L1488Yfs*18; A6801
DADTYILPR

SEQ ID NO: 21279 - protein, 9 aa, Homo sapiens
  AACR GENIE Results; APC_p.L1488Yfs*18; B3501
QVLPDADTY

SEQ ID NO: 21280 - protein, 9 aa, Homo sapiens
  AACR GENIE Results; APC_p.L1488Yfs*18; C0802
LPDADTYIL

SEQ ID NO: 21281 - protein, 8 aa, Homo sapiens
  AACR GENIE Results; APC_p.L1488Yfs*18; B1801
MDFLVHPA

SEQ ID NO: 21282 - protein, 9 aa, Homo sapiens
  AACR GENIE Results; APC_p.L1488Yfs*18; A2301
TYILPRKVL

SEQ ID NO: 21283 - protein, 11 aa, Homo sapiens
  AACR GENIE Results; APC_p.L1488Yfs*18; B2702
LPDADTYILPR

SEQ ID NO: 21284 - protein, 8 aa, Homo sapiens
  AACR GENIE Results; APC_p.L1488Yfs*19; B3701
MDFLVHPA

SEQ ID NO: 21285 - protein, 10 aa, Homo sapiens
  AACR GENIE Results; APC_p.L1488Yfs*19; B3503
LPDADTYYIL

SEQ ID NO: 21286 - protein, 9 aa, Homo sapiens
  AACR GENIE Results; APC_p.L1488Yfs*19; A0201
QMDFLVHPA

SEQ ID NO: 21287 - protein, 9 aa, Homo sapiens
  AACR GENIE Results; APC_p.L1488Yfs*19; C0602
TYYILPRKV

SEQ ID NO: 21288 - protein, 9 aa, Homo sapiens
  AACR GENIE Results; APC_p.L1488Yfs*19; C1402
YYILPRKVL

SEQ ID NO: 21289 - protein, 8 aa, Homo sapiens
  AACR GENIE Results; APC_p.L1488Yfs*19; B4002
MDFLVHPA

SEQ ID NO: 21290 - protein, 8 aa, Homo sapiens
  AACR GENIE Results; APC_p.L1488Yfs*19; B3502
DADTYYIL

SEQ ID NO: 21291 - protein, 10 aa, Homo sapiens
  AACR GENIE Results; APC_p.L1488Yfs*19; A6802
DTYYILPRKV

SEQ ID NO: 21292 - protein, 9 aa, Homo sapiens
  AACR GENIE Results; APC_p.L1488Yfs*19; B5001
QMDFLVHPA

SEQ ID NO: 21293 - protein, 9 aa, Homo sapiens
  AACR GENIE Results; APC_p.L1488Yfs*19; A3301
DTYYILPRK

SEQ ID NO: 21294 - protein, 8 aa, Homo sapiens
  AACR GENIE Results; APC_p.L1488Yfs*19; B3503
DADTYYIL

SEQ ID NO: 21295 - protein, 9 aa, Homo sapiens
  AACR GENIE Results; APC_p.L1488Yfs*19; A0205
QMDFLVHPA

SEQ ID NO: 21296 - protein, 9 aa, Homo sapiens
  AACR GENIE Results; APC_p.L1488Yfs*19; A6802
QMDFLVHPA

SEQ ID NO: 21297 - protein, 10 aa, Homo sapiens
  AACR GENIE Results; APC_p.L1488Yfs*19; B2702
DADTYYILPR

SEQ ID NO: 21298 - protein, 8 aa, Homo sapiens
  AACR GENIE Results; APC_p.L1488Yfs*19; B1801
MDFLVHPA

SEQ ID NO: 21299 - protein, 10 aa, Homo sapiens
  AACR GENIE Results; APC_p.L1488Yfs*19; B3502
LPDADTYYIL

SEQ ID NO: 21300 - protein, 8 aa, Homo sapiens
  AACR GENIE Results; APC_p.L1488Yfs*19; B5001
MDFLVHPA

SEQ ID NO: 21301 - protein, 8 aa, Homo sapiens
  AACR GENIE Results; APC_p.L1489Ffs*18; B3701
MDFLVHPA

SEQ ID NO: 21302 - protein, 9 aa, Homo sapiens
  AACR GENIE Results; APC_p.L1489Ffs*18; A0201
QMDFLVHPA

SEQ ID NO: 21303 - protein, 9 aa, Homo sapiens
  AACR GENIE Results; APC_p.L1489Ffs*18; B3906
QMDFLVHPA

SEQ ID NO: 21304 - protein, 8 aa, Homo sapiens
  AACR GENIE Results; APC_p.L1489Ffs*18; B3906
MDFLVHPA

SEQ ID NO: 21305 - protein, 8 aa, Homo sapiens
  AACR GENIE Results; APC_p.L1489Ffs*18; B4002
MDFLVHPA

SEQ ID NO: 21306 - protein, 9 aa, Homo sapiens
  AACR GENIE Results; APC_p.L1489Ffs*18; B5001
QMDFLVHPA

SEQ ID NO: 21307 - protein, 8 aa, Homo sapiens
  AACR GENIE Results; APC_p.L1489Ffs*18; B3508
LPDADTLF

SEQ ID NO: 21308 - protein, 9 aa, Homo sapiens
  AACR GENIE Results; APC_p.L1489Ffs*18; A0205
QMDFLVHPA

SEQ ID NO: 21309 - protein, 10 aa, Homo sapiens
  AACR GENIE Results; APC_p.L1489Ffs*18; B3503
LPDADTLFIL

SEQ ID NO: 21310 - protein, 8 aa, Homo sapiens
  AACR GENIE Results; APC_p.L1489Ffs*18; B3502
LPDADTLF

SEQ ID NO: 21311 - protein, 9 aa, Homo sapiens
  AACR GENIE Results; APC_p.L1489Ffs*18; A6802
QMDFLVHPA

SEQ ID NO: 21312 - protein, 8 aa, Homo sapiens
  AACR GENIE Results; APC_p.L1489Ffs*18; B1801
MDFLVHPA

SEQ ID NO: 21313 - protein, 8 aa, Homo sapiens
  AACR GENIE Results; APC_p.L1489Ffs*18; B5001
MDFLVHPA

SEQ ID NO: 21314 - protein, 9 aa, Homo sapiens
  AACR GENIE Results; APC_p.L1489Yfs*18; A0201
QMDFLVHPA

SEQ ID NO: 21315 - protein, 8 aa, Homo sapiens
  AACR GENIE Results; APC_p.L1489Yfs*18; B1801
MDFLVHPA

SEQ ID NO: 21316 - protein, 9 aa, Homo sapiens
  AACR GENIE Results; APC_p.L1489Yfs*19; A0201
QMDFLVHPA

SEQ ID NO: 21317 - protein, 9 aa, Homo sapiens
  AACR GENIE Results; APC_p.L1489Yfs*19; B3501
LPDADTLYY

SEQ ID NO: 21318 - protein, 9 aa, Homo sapiens
  AACR GENIE Results; APC_p.L1489Yfs*19; A2301
YYILPRKVL

SEQ ID NO: 21319 - protein, 9 aa, Homo sapiens
  AACR GENIE Results; APC_p.L1489Yfs*19; B2702
DTLYYILPR

SEQ ID NO: 21320 - protein, 8 aa, Homo sapiens
  AACR GENIE Results; APC_p.L1489Yfs*19; B1801
MDFLVHPA

SEQ ID NO: 21321 - protein, 9 aa, Homo sapiens
  AACR GENIE Results; APC_p.L1489Yfs*19; A0301
TLYYILPRK

SEQ ID NO: 21322 - protein, 9 aa, Homo sapiens
  AACR GENIE Results; APC_p.L1489Yfs*19; C0602
LYYILPRKV

SEQ ID NO: 21323 - protein, 9 aa, Homo sapiens
  AACR GENIE Results; APC_p.L2574I; A6802
SSSSIISAS

SEQ ID NO: 21324 - protein, 9 aa, Homo sapiens
  AACR GENIE Results; APC_p.M1413Wfs*2; B1501
VQSEPCSGW

SEQ ID NO: 21325 - protein, 9 aa, Homo sapiens
  AACR GENIE Results; APC_p.M1413Wfs*2; A3201
VQSEPCSGW

SEQ ID NO: 21326 - protein, 9 aa, Homo sapiens
  AACR GENIE Results; APC_p.M1413Wfs*2; B3801
VQSEPCSGW

SEQ ID NO: 21327 - protein, 9 aa, Homo sapiens
  AACR GENIE Results; APC_p.M1413Wfs*2; B4403
VQSEPCSGW

SEQ ID NO: 21328 - protein, 9 aa, Homo sapiens
  AACR GENIE Results; APC_p.M1413Wfs*2; B5701
VQSEPCSGW

SEQ ID NO: 21329 - protein, 11 aa, Homo sapiens
  AACR GENIE Results; APC_p.M1413Wfs*2; B5701
SSVQSEPCSGW

SEQ ID NO: 21330 - protein, 9 aa, Homo sapiens
  AACR GENIE Results; APC_p.M1413Wfs*2; B4402
VQSEPCSGW

SEQ ID NO: 21331 - protein, 9 aa, Homo sapiens
  AACR GENIE Results; APC_p.M1431Cfs*42; B1501
KQLKPSEKY

SEQ ID NO: 21332 - protein, 9 aa, Homo sapiens
  AACR GENIE Results; APC_p.M1431Cfs*42; A2301
KYLKIKHLL

SEQ ID NO: 21333 - protein, 9 aa, Homo sapiens
  AACR GENIE Results; APC_p.M1431Cfs*42; B4403
AEVKHLHHL

SEQ ID NO: 21334 - protein, 10 aa, Homo sapiens
  AACR GENIE Results; APC_p.M1431Cfs*42; A2301
KYLKIKHLLL

SEQ ID NO: 21335 - protein, 9 aa, Homo sapiens
  AACR GENIE Results; APC_p.M1431Cfs*42; B0702
KPSEKYLKI

SEQ ID NO: 21336 - protein, 8 aa, Homo sapiens
  AACR GENIE Results; APC_p.M1431Cfs*42; B1501
HQAEVKHL

SEQ ID NO: 21337 - protein, 9 aa, Homo sapiens
  AACR GENIE Results; APC_p.M1431Cfs*42; B1302
GQTCHQAEV

SEQ ID NO: 21338 - protein, 9 aa, Homo sapiens
  AACR GENIE Results; APC_p.N1142S; B1801
YEDDKPTSY

SEQ ID NO: 21339 - protein, 9 aa, Homo sapiens
  AACR GENIE Results; APC_p.N1142S; B4403
YEDDKPTSY

SEQ ID NO: 21340 - protein, 9 aa, Homo sapiens
  AACR GENIE Results; APC_p.N1142S; A0101
YEDDKPTSY

SEQ ID NO: 21341 - protein, 9 aa, Homo sapiens
  AACR GENIE Results; APC_p.N1142S; B4402
YEDDKPTSY

SEQ ID NO: 21342 - protein, 9 aa, Homo sapiens
  AACR GENIE Results; APC_p.N1142S; B1501
YEDDKPTSY

SEQ ID NO: 21343 - protein, 9 aa, Homo sapiens
  AACR GENIE Results; APC_p.N1142S; B3501
YEDDKPTSY

SEQ ID NO: 21344 - protein, 9 aa, Homo sapiens
  AACR GENIE Results; APC_p.N1142S; B4001
YEDDKPTSY

SEQ ID NO: 21345 - protein, 9 aa, Homo sapiens
  AACR GENIE Results; APC_p.N1142S; B3501
KPTSYSERY

SEQ ID NO: 21346 - protein, 9 aa, Homo sapiens
  AACR GENIE Results; APC_p.N1142S; A2601
YEDDKPTSY

SEQ ID NO: 21347 - protein, 11 aa, Homo sapiens
  AACR GENIE Results; APC_p.N1142S; B1801
DDYEDDKPTSY

SEQ ID NO: 21348 - protein, 8 aa, Homo sapiens
  AACR GENIE Results; APC_p.N1142S; A0101
EDDKPTSY

SEQ ID NO: 21349 - protein, 9 aa, Homo sapiens
  AACR GENIE Results; APC_p.N1142S; B0801
YEDDKPTSY

SEQ ID NO: 21350 - protein, 8 aa, Homo sapiens
  AACR GENIE Results; APC_p.N1455Ifs*18; B0801
VPKIKHLL

SEQ ID NO: 21351 - protein, 9 aa, Homo sapiens
  AACR GENIE Results; APC_p.N1455Ifs*18; B4403
REVPKIKHL

SEQ ID NO: 21352 - protein, 9 aa, Homo sapiens
  AACR GENIE Results; APC_p.N1473Mfs*34; B1501
KQAAVMLQF

SEQ ID NO: 21353 - protein, 9 aa, Homo sapiens
  AACR GENIE Results; APC_p.N1473Mfs*34; A0201
QMDFLVHPA

SEQ ID NO: 21354 - protein, 9 aa, Homo sapiens
  AACR GENIE Results; APC_p.N1473Mfs*34; A3201
KQAAVMLQF

SEQ ID NO: 21355 - protein, 9 aa, Homo sapiens
  AACR GENIE Results; APC_p.N1473Mfs*34; A0301
ILYYILPRK

SEQ ID NO: 21356 - protein, 8 aa, Homo sapiens
  AACR GENIE Results; APC_p.N1473Mfs*34; B1801
MDFLVHPA

SEQ ID NO: 21357 - protein, 9 aa, Homo sapiens
  AACR GENIE Results; APC_p.N1473Mfs*34; C0602
LYYILPRKV

SEQ ID NO: 21358 - protein, 10 aa, Homo sapiens
  AACR GENIE Results; APC_p.N1531Mfs*34; A0301
GMKQNQSSLK

SEQ ID NO: 21359 - protein, 9 aa, Homo sapiens
  AACR GENIE Results; APC_p.N1531Mfs*34; B1501
GMKQNQSSL

SEQ ID NO: 21360 - protein, 8 aa, Homo sapiens
  AACR GENIE Results; APC_p.N1531Mfs*34; C1601
QSSLKNQM

SEQ ID NO: 21361 - protein, 9 aa, Homo sapiens
  AACR GENIE Results; APC_p.N1531Mfs*34; A3001
GMKQNQSSL

SEQ ID NO: 21362 - protein, 11 aa, Homo sapiens
  AACR GENIE Results; APC_p.N1531Mfs*34; B1501
KQNQSSLKNQM

SEQ ID NO: 21363 - protein, 9 aa, Homo sapiens
  AACR GENIE Results; APC_p.N1531Mfs*34; A0301
SLKNQMKTK

SEQ ID NO: 21364 - protein, 8 aa, Homo sapiens
  AACR GENIE Results; APC_p.N1531Mfs*34; B0801
QSSLKNQM

SEQ ID NO: 21365 - protein, 9 aa, Homo sapiens
  AACR GENIE Results; APC_p.N1531Mfs*34; C0602
KRQKKLLIL

SEQ ID NO: 21366 - protein, 9 aa, Homo sapiens
  AACR GENIE Results; APC_p.N1531Mfs*34; B3801
NQSSLKNQM

SEQ ID NO: 21367 - protein, 10 aa, Homo sapiens
  AACR GENIE Results; APC_p.N1531Mfs*34; A1101
SSLKNQMKTK

SEQ ID NO: 21368 - protein, 9 aa, Homo sapiens
  AACR GENIE Results; APC_p.N627Lfs*2; B0801
TLTYRSQTL

SEQ ID NO: 21369 - protein, 8 aa, Homo sapiens
  AACR GENIE Results; APC_p.N627Lfs*2; C0304
LTYRSQTL

SEQ ID NO: 21370 - protein, 8 aa, Homo sapiens
  AACR GENIE Results; APC_p.N627Lfs*2; C0303
LTYRSQTL

SEQ ID NO: 21371 - protein, 9 aa, Homo sapiens
  AACR GENIE Results; APC_p.N627Lfs*2; B0702
TLTYRSQTL

SEQ ID NO: 21372 - protein, 8 aa, Homo sapiens
  AACR GENIE Results; APC_p.N627Lfs*2; C1203
LTYRSQTL

SEQ ID NO: 21373 - protein, 8 aa, Homo sapiens
  AACR GENIE Results; APC_p.N627Lfs*2; B5701
LTYRSQTL

SEQ ID NO: 21374 - protein, 8 aa, Homo sapiens
  AACR GENIE Results; APC_p.N627Lfs*2; B0801
LTYRSQTL

SEQ ID NO: 21375 - protein, 9 aa, Homo sapiens
  AACR GENIE Results; APC_p.N627Lfs*2; B1501
TLTYRSQTL

SEQ ID NO: 21376 - protein, 10 aa, Homo sapiens
  AACR GENIE Results; APC_p.N627Lfs*2; B0801
GTLTYRSQTL

SEQ ID NO: 21377 - protein, 9 aa, Homo sapiens
  AACR GENIE Results; APC_p.N627Lfs*2; A0201
TLTYRSQTL

SEQ ID NO: 21378 - protein, 10 aa, Homo sapiens
  AACR GENIE Results; APC_p.N627Lfs*2; B5701
GTLTYRSQTL

SEQ ID NO: 21379 - protein, 8 aa, Homo sapiens
  AACR GENIE Results; APC_p.N627Lfs*2; B1501
LTYRSQTL

SEQ ID NO: 21380 - protein, 9 aa, Homo sapiens
  AACR GENIE Results; APC_p.N741Ifs*20; A2301
KYKDAILCL

SEQ ID NO: 21381 - protein, 9 aa, Homo sapiens
  AACR GENIE Results; APC_p.N741Ifs*20; A2402
KYKDAILCL

SEQ ID NO: 21382 - protein, 9 aa, Homo sapiens
  AACR GENIE Results; APC_p.N741Ifs*20; C0702
KYKDAILCL

SEQ ID NO: 21383 - protein, 9 aa, Homo sapiens
  AACR GENIE Results; APC_p.N942Ffs*3; A2402
TYNFTKSEF

SEQ ID NO: 21384 - protein, 9 aa, Homo sapiens
  AACR GENIE Results; APC_p.N942Ffs*3; A2301
TYNFTKSEF

SEQ ID NO: 21385 - protein, 8 aa, Homo sapiens
  AACR GENIE Results; APC_p.N942Ffs*3; B0801
YNFTKSEF

SEQ ID NO: 21386 - protein, 10 aa, Homo sapiens
  AACR GENIE Results; APC_p.N942Ffs*3; A2601
NTYNFTKSEF

SEQ ID NO: 21387 - protein, 9 aa, Homo sapiens
  AACR GENIE Results; APC_p.N942Ffs*3; A2902
TYNFTKSEF

SEQ ID NO: 21388 - protein, 9 aa, Homo sapiens
  AACR GENIE Results; APC_p.N942Ffs*3; C0702
TYNFTKSEF

SEQ ID NO: 21389 - protein, 9 aa, Homo sapiens
  AACR GENIE Results; APC_p.P1043Ffs*4; A3201
QLNSGRQSF

SEQ ID NO: 21390 - protein, 9 aa, Homo sapiens
  AACR GENIE Results; APC_p.P1043Ffs*4; B1501
QLNSGRQSF

SEQ ID NO: 21391 - protein, 11 aa, Homo sapiens
  AACR GENIE Results; APC_p.P1043Ffs*4; B4402
DEQLNSGRQSF

SEQ ID NO: 21392 - protein, 11 aa, Homo sapiens
  AACR GENIE Results; APC_p.P1043Ffs*4; B4403
DEQLNSGRQSF

SEQ ID NO: 21393 - protein, 11 aa, Homo sapiens
  AACR GENIE Results; APC_p.P1043Ffs*4; B1801
DEQLNSGRQSF

SEQ ID NO: 21394 - protein, 9 aa, Homo sapiens
  AACR GENIE Results; APC_p.P1043Ffs*4; B0702
QLNSGRQSF

SEQ ID NO: 21395 - protein, 11 aa, Homo sapiens
  AACR GENIE Results; APC_p.P1043Ffs*4; A2301
DEQLNSGRQSF

SEQ ID NO: 21396 - protein, 10 aa, Homo sapiens
  AACR GENIE Results; APC_p.P1043Ffs*4; B1501
EQLNSGRQSF

SEQ ID NO: 21397 - protein, 10 aa, Homo sapiens
  AACR GENIE Results; APC_p.P1043Ffs*4; B4403
EQLNSGRQSF

SEQ ID NO: 21398 - protein, 10 aa, Homo sapiens
  AACR GENIE Results; APC_p.P1043Ffs*4; B3801
EQLNSGRQSF

SEQ ID NO: 21399 - protein, 10 aa, Homo sapiens
  AACR GENIE Results; APC_p.P1043Ffs*4; B4402
EQLNSGRQSF

SEQ ID NO: 21400 - protein, 9 aa, Homo sapiens
  AACR GENIE Results; APC_p.P1424Qfs*49; B1501
KQLKPSEKY

SEQ ID NO: 21401 - protein, 9 aa, Homo sapiens
  AACR GENIE Results; APC_p.P1424Qfs*49; A2301
KYLKIKHLL

SEQ ID NO: 21402 - protein, 10 aa, Homo sapiens
  AACR GENIE Results; APC_p.P1424Qfs*49; A2301
KYLKIKHLLL

SEQ ID NO: 21403 - protein, 9 aa, Homo sapiens
  AACR GENIE Results; APC_p.P1424Qfs*49; B4403
AEVKHLHHL

SEQ ID NO: 21404 - protein, 9 aa, Homo sapiens
  AACR GENIE Results; APC_p.P1424Qfs*49; B0702
KPSEKYLKI

SEQ ID NO: 21405 - protein, 9 aa, Homo sapiens
  AACR GENIE Results; APC_p.P1424Qfs*49; B3501
SPSDLQIAL

SEQ ID NO: 21406 - protein, 9 aa, Homo sapiens
  AACR GENIE Results; APC_p.P1424Qfs*49; B0702
SPSDLQIAL

SEQ ID NO: 21407 - protein, 9 aa, Homo sapiens
  AACR GENIE Results; APC_p.P1427Lfs*46; B1501
KQLKPSEKY

SEQ ID NO: 21408 - protein, 9 aa, Homo sapiens
  AACR GENIE Results; APC_p.P1427Lfs*46; A2301
KYLKIKHLL

SEQ ID NO: 21409 - protein, 10 aa, Homo sapiens
  AACR GENIE Results; APC_p.P1427Lfs*46; A2301
KYLKIKHLLL

SEQ ID NO: 21410 - protein, 9 aa, Homo sapiens
  AACR GENIE Results; APC_p.P1427Lfs*46; B4403
AEVKHLHHL

SEQ ID NO: 21411 - protein, 9 aa, Homo sapiens
  AACR GENIE Results; APC_p.P1427Lfs*46; B0702
KPSEKYLKI

SEQ ID NO: 21412 - protein, 9 aa, Homo sapiens
  AACR GENIE Results; APC_p.P1432Cfs*42; B1501
KQLKPSEKY

SEQ ID NO: 21413 - protein, 9 aa, Homo sapiens
  AACR GENIE Results; APC_p.P1432Cfs*42; A2301
KYLKIKHLL

SEQ ID NO: 21414 - protein, 9 aa, Homo sapiens
  AACR GENIE Results; APC_p.P1432Cfs*42; B4403
AEVKHLHHL

SEQ ID NO: 21415 - protein, 9 aa, Homo sapiens
  AACR GENIE Results; APC_p.P1432Cfs*42; B4002
AEVKHLHHL

SEQ ID NO: 21416 - protein, 10 aa, Homo sapiens
  AACR GENIE Results; APC_p.P1432Cfs*42; A2301
KYLKIKHLLL

SEQ ID NO: 21417 - protein, 8 aa, Homo sapiens
  AACR GENIE Results; APC_p.P1432Cfs*42; B1501
HQAEVKHL

SEQ ID NO: 21418 - protein, 9 aa, Homo sapiens
  AACR GENIE Results; APC_p.P1432Cfs*42; B0702
KPSEKYLKI

SEQ ID NO: 21419 - protein, 9 aa, Homo sapiens
  AACR GENIE Results; APC_p.P1432Cfs*42; A3002
KQLKPSEKY

SEQ ID NO: 21420 - protein, 9 aa, Homo sapiens
  AACR GENIE Results; APC_p.P1439Hfs*35; B1501
KQLKPSEKY

SEQ ID NO: 21421 - protein, 9 aa, Homo sapiens
  AACR GENIE Results; APC_p.P1439Hfs*35; B0702
KPSEKYLKI

SEQ ID NO: 21422 - protein, 9 aa, Homo sapiens
  AACR GENIE Results; APC_p.P1439Lfs*34; B1501
KQLKPSEKY

SEQ ID NO: 21423 - protein, 9 aa, Homo sapiens
  AACR GENIE Results; APC_p.P1439Lfs*34; A2301
KYLKIKHLL

SEQ ID NO: 21424 - protein, 10 aa, Homo sapiens
  AACR GENIE Results; APC_p.P1439Lfs*34; A2301
KYLKIKHLLL

SEQ ID NO: 21425 - protein, 9 aa, Homo sapiens
  AACR GENIE Results; APC_p.P1439Lfs*34; B5701
RSKTLHHLL

SEQ ID NO: 21426 - protein, 9 aa, Homo sapiens
  AACR GENIE Results; APC_p.P1439Lfs*34; B0702
KPSEKYLKI

SEQ ID NO: 21427 - protein, 9 aa, Homo sapiens
  AACR GENIE Results; APC_p.P1440Hfs*33; B1501
KQLKPSEKY

SEQ ID NO: 21428 - protein, 9 aa, Homo sapiens
  AACR GENIE Results; APC_p.P1440Hfs*33; A2301
KYLKIKHLL

SEQ ID NO: 21429 - protein, 10 aa, Homo sapiens
  AACR GENIE Results; APC_p.P1440Hfs*33; A2301
KYLKIKHLLL

SEQ ID NO: 21430 - protein, 9 aa, Homo sapiens
  AACR GENIE Results; APC_p.P1440Hfs*33; B0702
KPSEKYLKI

SEQ ID NO: 21431 - protein, 9 aa, Homo sapiens
  AACR GENIE Results; APC_p.P1443Lfs*30; A2301
KYLKIKHLL

SEQ ID NO: 21432 - protein, 9 aa, Homo sapiens
  AACR GENIE Results; APC_p.P1443Lfs*30; B1501
KQLKPSEKY

SEQ ID NO: 21433 - protein, 10 aa, Homo sapiens
  AACR GENIE Results; APC_p.P1443Lfs*30; A2301
KYLKIKHLLL

SEQ ID NO: 21434 - protein, 9 aa, Homo sapiens
  AACR GENIE Results; APC_p.P1443Lfs*30; B0702
KPSEKYLKI

SEQ ID NO: 21435 - protein, 9 aa, Homo sapiens
  AACR GENIE Results; APC_p.P1497Qfs*10; B4001
TESTQMDFL

SEQ ID NO: 21436 - protein, 10 aa, Homo sapiens
  AACR GENIE Results; APC_p.P1497Qfs*10; B5001
TQMDFLVHPA

SEQ ID NO: 21437 - protein, 10 aa, Homo sapiens
  AACR GENIE Results; APC_p.P1497Qfs*10; A0205
TQMDFLVHPA

SEQ ID NO: 21438 - protein, 8 aa, Homo sapiens
  AACR GENIE Results; APC_p.P1497Qfs*10; B3701
TESTQMDF

SEQ ID NO: 21439 - protein, 8 aa, Homo sapiens
  AACR GENIE Results; APC_p.P1497Qfs*10; B3701
MDFLVHPA

SEQ ID NO: 21440 - protein, 9 aa, Homo sapiens
  AACR GENIE Results; APC_p.P1497Qfs*10; A0201
QMDFLVHPA

SEQ ID NO: 21441 - protein, 10 aa, Homo sapiens
  AACR GENIE Results; APC_p.P1497Qfs*10; A3001
TQMDFLVHPA

SEQ ID NO: 21442 - protein, 10 aa, Homo sapiens
  AACR GENIE Results; APC_p.P1497Qfs*10; A0201
TQMDFLVHPA

SEQ ID NO: 21443 - protein, 8 aa, Homo sapiens
  AACR GENIE Results; APC_p.P1497Qfs*10; B1801
TESTQMDF

SEQ ID NO: 21444 - protein, 9 aa, Homo sapiens
  AACR GENIE Results; APC_p.P1497Qfs*10; A6802
ESTQMDFLV

SEQ ID NO: 21445 - protein, 8 aa, Homo sapiens
  AACR GENIE Results; APC_p.P1497Qfs*10; B3503
FATESTQM

SEQ ID NO: 21446 - protein, 8 aa, Homo sapiens
  AACR GENIE Results; APC_p.P1497Qfs*10; B4002
MDFLVHPA

SEQ ID NO: 21447 - protein, 9 aa, Homo sapiens
  AACR GENIE Results; APC_p.P1497Qfs*10; B4901
TESTQMDFL

SEQ ID NO: 21448 - protein, 8 aa, Homo sapiens
  AACR GENIE Results; APC_p.P1497Qfs*10; B3501
FATESTQM

SEQ ID NO: 21449 - protein, 9 aa, Homo sapiens
  AACR GENIE Results; APC_p.P1497Qfs*10; A1101
STQMDFLVH

SEQ ID NO: 21450 - protein, 9 aa, Homo sapiens
  AACR GENIE Results; APC_p.P1497Qfs*10; B4002
TESTQMDFL

SEQ ID NO: 21451 - protein, 8 aa, Homo sapiens
  AACR GENIE Results; APC_p.P1497Qfs*10; C0304
FATESTQM

SEQ ID NO: 21452 - protein, 9 aa, Homo sapiens
  AACR GENIE Results; APC_p.P1497Qfs*10; C1402
HFATESTQM

SEQ ID NO: 21453 - protein, 8 aa, Homo sapiens
  AACR GENIE Results; APC_p.P1497Qfs*10; C1601
FATESTQM

SEQ ID NO: 21454 - protein, 10 aa, Homo sapiens
  AACR GENIE Results; APC_p.P1497Qfs*10; A6802
TQMDFLVHPA

SEQ ID NO: 21455 - protein, 10 aa, Homo sapiens
  AACR GENIE Results; APC_p.P1497Qfs*10; B3801
LHFATESTQM

SEQ ID NO: 21456 - protein, 9 aa, Homo sapiens
  AACR GENIE Results; APC_p.P1497Qfs*10; B5801
ATESTQMDF

SEQ ID NO: 21457 - protein, 9 aa, Homo sapiens
  AACR GENIE Results; APC_p.P1497Qfs*10; B5001
QMDFLVHPA

SEQ ID NO: 21458 - protein, 9 aa, Homo sapiens
  AACR GENIE Results; APC_p.P1497Qfs*10; A0205
QMDFLVHPA

SEQ ID NO: 21459 - protein, 8 aa, Homo sapiens
  AACR GENIE Results; APC_p.P1497Qfs*10; B1801
MDFLVHPA

SEQ ID NO: 21460 - protein, 9 aa, Homo sapiens
  AACR GENIE Results; APC_p.P1497Qfs*10; A3001
TESTQMDFL

SEQ ID NO: 21461 - protein, 8 aa, Homo sapiens
  AACR GENIE Results; APC_p.P1497Qfs*10; C0303
FATESTQM

SEQ ID NO: 21462 - protein, 8 aa, Homo sapiens
  AACR GENIE Results; APC_p.P1497Qfs*10; B3502
FATESTQM

SEQ ID NO: 21463 - protein, 9 aa, Homo sapiens
  AACR GENIE Results; APC_p.P1497Qfs*10; A6802
QMDFLVHPA

SEQ ID NO: 21464 - protein, 10 aa, Homo sapiens
  AACR GENIE Results; APC_p.P1497Qfs*10; B2702
FATESTQMDF

SEQ ID NO: 21465 - protein, 9 aa, Homo sapiens
  AACR GENIE Results; APC_p.P1497Qfs*10; B5001
TQMDFLVHP

SEQ ID NO: 21466 - protein, 10 aa, Homo sapiens
  AACR GENIE Results; APC_p.P1497Qfs*10; A3101
TQMDFLVHPA

SEQ ID NO: 21467 - protein, 8 aa, Homo sapiens
  AACR GENIE Results; APC_p.P1497Qfs*10; B5001
MDFLVHPA

SEQ ID NO: 21468 - protein, 10 aa, Homo sapiens
  AACR GENIE Results; APC_p.Q1294Gfs*6; B1501
GCNQTTGSRF

SEQ ID NO: 21469 - protein, 9 aa, Homo sapiens
  AACR GENIE Results; APC_p.Q1303Kfs*2; A6801
EADSANTLK

SEQ ID NO: 21470 - protein, 9 aa, Homo sapiens
  AACR GENIE Results; APC_p.Q1303Kfs*2; A1101
EADSANTLK

SEQ ID NO: 21471 - protein, 8 aa, Homo sapiens
  AACR GENIE Results; APC_p.Q1303Kfs*2; A1101
ADSANTLK

SEQ ID NO: 21472 - protein, 11 aa, Homo sapiens
  AACR GENIE Results; APC_p.Q1303Kfs*2; A1101
TQEADSANTLK

SEQ ID NO: 21473 - protein, 9 aa, Homo sapiens
  AACR GENIE Results; APC_p.Q1429Kfs*44; B1501
KQLKPSEKY

SEQ ID NO: 21474 - protein, 9 aa, Homo sapiens
  AACR GENIE Results; APC_p.Q1429Kfs*44; A2301
KYLKIKHLL

SEQ ID NO: 21475 - protein, 10 aa, Homo sapiens
  AACR GENIE Results; APC_p.Q1429Kfs*44; A2301
KYLKIKHLLL

SEQ ID NO: 21476 - protein, 9 aa, Homo sapiens
  AACR GENIE Results; APC_p.Q1429Kfs*44; B4403
AEVKHLHHL

SEQ ID NO: 21477 - protein, 9 aa, Homo sapiens
  AACR GENIE Results; APC_p.Q1429Kfs*44; B0702
KPSEKYLKI

SEQ ID NO: 21478 - protein, 10 aa, Homo sapiens
  AACR GENIE Results; APC_p.Q541Tfs*19; B4403
SESEDLTAGY

SEQ ID NO: 21479 - protein, 9 aa, Homo sapiens
  AACR GENIE Results; APC_p.Q541Tfs*19; A0101
ESEDLTAGY

SEQ ID NO: 21480 - protein, 8 aa, Homo sapiens
  AACR GENIE Results; APC_p.Q541Tfs*19; B1801
SEDLTAGY

SEQ ID NO: 21481 - protein, 10 aa, Homo sapiens
  AACR GENIE Results; APC_p.Q541Tfs*19; B4402
SESEDLTAGY

SEQ ID NO: 21482 - protein, 9 aa, Homo sapiens
  AACR GENIE Results; APC_p.Q541Tfs*19; B1801
EEFVLASRC

SEQ ID NO: 21483 - protein, 10 aa, Homo sapiens
  AACR GENIE Results; APC_p.Q541Tfs*19; B1801
SESEDLTAGY

SEQ ID NO: 21484 - protein, 9 aa, Homo sapiens
  AACR GENIE Results; APC_p.Q541Tfs*19; A2601
ESEDLTAGY

SEQ ID NO: 21485 - protein, 8 aa, Homo sapiens
  AACR GENIE Results; APC_p.Q541Tfs*19; B1801
EEFVLASR

SEQ ID NO: 21486 - protein, 8 aa, Homo sapiens
  AACR GENIE Results; APC_p.Q541Tfs*19; B4402
SEDLTAGY

SEQ ID NO: 21487 - protein, 8 aa, Homo sapiens
  AACR GENIE Results; APC_p.Q541Tfs*19; B4403
SEDLTAGY

SEQ ID NO: 21488 - protein, 11 aa, Homo sapiens
  AACR GENIE Results; APC_p.Q541Tfs*19; A0101
KSESEDLTAGY

SEQ ID NO: 21489 - protein, 9 aa, Homo sapiens
  AACR GENIE Results; APC_p.R1314Gfs*7; A2601
EIKEKIGTG

SEQ ID NO: 21490 - protein, 9 aa, Homo sapiens
  AACR GENIE Results; APC_p.R1314Gfs*7; B4001
KEKIGTGQL

SEQ ID NO: 21491 - protein, 9 aa, Homo sapiens
  AACR GENIE Results; APC_p.R1314Gfs*7; B0702
KEKIGTGQL

SEQ ID NO: 21492 - protein, 8 aa, Homo sapiens
  AACR GENIE Results; APC_p.R1314Gfs*7; A0301
KIGTGQLK

SEQ ID NO: 21493 - protein, 10 aa, Homo sapiens
  AACR GENIE Results; APC_p.R1399Ffs*9; A6802
DSFESFDCQL

SEQ ID NO: 21494 - protein, 9 aa, Homo sapiens
  AACR GENIE Results; APC_p.R1399Ffs*9; B5801
SSLDSFESF

SEQ ID NO: 21495 - protein, 8 aa, Homo sapiens
  AACR GENIE Results; APC_p.R1399Ffs*9; A3303
ESFDCQLR

SEQ ID NO: 21496 - protein, 10 aa, Homo sapiens
  AACR GENIE Results; APC_p.R1399Ffs*9; A6801
DSFESFDCQL

SEQ ID NO: 21497 - protein, 9 aa, Homo sapiens
  AACR GENIE Results; APC_p.R1399Ffs*9; B1501
SSLDSFESF

SEQ ID NO: 21498 - protein, 11 aa, Homo sapiens
  AACR GENIE Results; APC_p.R1399Ffs*9; A6801
DSFESFDCQLR

SEQ ID NO: 21499 - protein, 8 aa, Homo sapiens
  AACR GENIE Results; APC_p.R1399Ffs*9; B4001
FESFDCQL

SEQ ID NO: 21500 - protein, 9 aa, Homo sapiens
  AACR GENIE Results; APC_p.R2714C; B5101
NGSVPMCTV

SEQ ID NO: 21501 - protein, 9 aa, Homo sapiens
  AACR GENIE Results; APC_p.R640W; B4403
IESGGGILW

SEQ ID NO: 21502 - protein, 9 aa, Homo sapiens
  AACR GENIE Results; APC_p.R640W; B4402
IESGGGILW

SEQ ID NO: 21503 - protein, 11 aa, Homo sapiens
  AACR GENIE Results; APC_p.R640W; B5701
AIIESGGGILW

SEQ ID NO: 21504 - protein, 10 aa, Homo sapiens
  AACR GENIE Results; APC_p.R640W; B5701
IIESGGGILW

SEQ ID NO: 21505 - protein, 9 aa, Homo sapiens
  AACR GENIE Results; APC_p.R640W; A2301
IESGGGILW

SEQ ID NO: 21506 - protein, 11 aa, Homo sapiens
  AACR GENIE Results; APC_p.R653K; A1101
ATNEDHKQILR

SEQ ID NO: 21507 - protein, 11 aa, Homo sapiens
  AACR GENIE Results; APC_p.R653K; A3101
ATNEDHKQILR

SEQ ID NO: 21508 - protein, 9 aa, Homo sapiens
  AACR GENIE Results; APC_p.S1298Lfs*7; A6801
EADLLIPCK

SEQ ID NO: 21509 - protein, 8 aa, Homo sapiens
  AACR GENIE Results; APC_p.S1355Ffs*19; B4403
SEISLQKW

SEQ ID NO: 21510 - protein, 8 aa, Homo sapiens
  AACR GENIE Results; APC_p.S1355Ffs*19; B4402
SEISLQKW

SEQ ID NO: 21511 - protein, 9 aa, Homo sapiens
  AACR GENIE Results; APC_p.S1355Ffs*19; B5701
RSEISLQKW

SEQ ID NO: 21512 - protein, 9 aa, Homo sapiens
  AACR GENIE Results; APC_p.S1355Ffs*19; B2705
FRSEISLQK

SEQ ID NO: 21513 - protein, 8 aa, Homo sapiens
  AACR GENIE Results; APC_p.S1355Ffs*19; A2301
SEISLQKW

SEQ ID NO: 21514 - protein, 8 aa, Homo sapiens
  AACR GENIE Results; APC_p.S1355Ffs*19; B4901
VEFFRSEI

SEQ ID NO: 21515 - protein, 9 aa, Homo sapiens
  AACR GENIE Results; APC_p.S1355Lfs*60; A0201
CLADVLLSV

SEQ ID NO: 21516 - protein, 11 aa, Homo sapiens
  AACR GENIE Results; APC_p.S1355Lfs*60; B5701
APFRVNHAVEW

SEQ ID NO: 21517 - protein, 9 aa, Homo sapiens
  AACR GENIE Results; APC_p.S1355Lfs*60; B5101
DVLLSVHLI

SEQ ID NO: 21518 - protein, 9 aa, Homo sapiens
  AACR GENIE Results; APC_p.S1355Lfs*60; B4901
QERNLPPKV

SEQ ID NO: 21519 - protein, 9 aa, Homo sapiens
  AACR GENIE Results; APC_p.S1355Lfs*60; B1302
CLADVLLSV

SEQ ID NO: 21520 - protein, 9 aa, Homo sapiens
  AACR GENIE Results; APC_p.S1355Lfs*60; A3001
QERNLPPKV

SEQ ID NO: 21521 - protein, 9 aa, Homo sapiens
  AACR GENIE Results; APC_p.S1355Lfs*60; A3101
VVRLPAPFR

SEQ ID NO: 21522 - protein, 9 aa, Homo sapiens
  AACR GENIE Results; APC_p.S1355Lfs*60; C1502
SVHLIVLRV

SEQ ID NO: 21523 - protein, 9 aa, Homo sapiens
  AACR GENIE Results; APC_p.S1355Lfs*60; C0602
FRVNHAVEW

SEQ ID NO: 21524 - protein, 8 aa, Homo sapiens
  AACR GENIE Results; APC_p.S1355Lfs*60; B5701
RVNHAVEW

SEQ ID NO: 21525 - protein, 9 aa, Homo sapiens
  AACR GENIE Results; APC_p.S1355Lfs*60; C0602
VRLPAPFRV

SEQ ID NO: 21526 - protein, 9 aa, Homo sapiens
  AACR GENIE Results; APC_p.S1355Lfs*60; B0702
HPKVHLNTM

SEQ ID NO: 21527 - protein, 9 aa, Homo sapiens
  AACR GENIE Results; APC_p.S1355Lfs*60; B1302
SVHLIVLRV

SEQ ID NO: 21528 - protein, 9 aa, Homo sapiens
  AACR GENIE Results; APC_p.S1355Lfs*60; B5701
RVVRLPAPF

SEQ ID NO: 21529 - protein, 9 aa, Homo sapiens
  AACR GENIE Results; APC_p.S1355Lfs*60; B0801
HPKVHLNTM

SEQ ID NO: 21530 - protein, 8 aa, Homo sapiens
  AACR GENIE Results; APC_p.S1355Lfs*60; B0801
NLPPKVVL

SEQ ID NO: 21531 - protein, 8 aa, Homo sapiens
  AACR GENIE Results; APC_p.S1355Lfs*60; A3101
SVHLIVLR

SEQ ID NO: 21532 - protein, 10 aa, Homo sapiens
  AACR GENIE Results; APC_p.S1355Lfs*60; A3101
RNLPPKVVLR

SEQ ID NO: 21533 - protein, 9 aa, Homo sapiens
  AACR GENIE Results; APC_p.S1355Lfs*60; C0702
FRVNHAVEW

SEQ ID NO: 21534 - protein, 9 aa, Homo sapiens
  AACR GENIE Results; APC_p.S1355Lfs*60; B4001
VEFLQERNL

SEQ ID NO: 21535 - protein, 9 aa, Homo sapiens
  AACR GENIE Results; APC_p.S1355Lfs*60; A0301
VVRLPAPFR

SEQ ID NO: 21536 - protein, 8 aa, Homo sapiens
  AACR GENIE Results; APC_p.S1355Lfs*60; A3303
SVHLIVLR

SEQ ID NO: 21537 - protein, 9 aa, Homo sapiens
  AACR GENIE Results; APC_p.S1355Lfs*60; B2705
FRVNHAVEW

SEQ ID NO: 21538 - protein, 8 aa, Homo sapiens
  AACR GENIE Results; APC_p.S1355Lfs*60; B5501
APFRVNHA

SEQ ID NO: 21539 - protein, 9 aa, Homo sapiens
  AACR GENIE Results; APC_p.S1355Lfs*60; A0201
FLQERNLPP

SEQ ID NO: 21540 - protein, 9 aa, Homo sapiens
  AACR GENIE Results; APC_p.S1411Rfs*4; B5701
VQSEPCREW

SEQ ID NO: 21541 - protein, 10 aa, Homo sapiens
  AACR GENIE Results; APC_p.S1411Rfs*4; B5701
SVQSEPCREW

SEQ ID NO: 21542 - protein, 11 aa, Homo sapiens
  AACR GENIE Results; APC_p.S1411Rfs*4; B5701
SSVQSEPCREW

SEQ ID NO: 21543 - protein, 9 aa, Homo sapiens
  AACR GENIE Results; APC_p.S1411Rfs*4; B5801
VQSEPCREW

SEQ ID NO: 21544 - protein, 9 aa, Homo sapiens
  AACR GENIE Results; APC_p.S1411Rfs*4; B1501
VQSEPCREW

SEQ ID NO: 21545 - protein, 9 aa, Homo sapiens
  AACR GENIE Results; APC_p.S1411Rfs*4; B4403
VQSEPCREW

SEQ ID NO: 21546 - protein, 9 aa, Homo sapiens
  AACR GENIE Results; APC_p.S1411Rfs*4; A3001
VQSEPCREW

SEQ ID NO: 21547 - protein, 8 aa, Homo sapiens
  AACR GENIE Results; APC_p.S1411Rfs*4; B5701
QSEPCREW

SEQ ID NO: 21548 - protein, 11 aa, Homo sapiens
  AACR GENIE Results; APC_p.S1411Rfs*4; A6801
IASSVQSEPCR

SEQ ID NO: 21549 - protein, 10 aa, Homo sapiens
  AACR GENIE Results; APC_p.S1415Kfs*8; B4403
SEPCSGMVKW

SEQ ID NO: 21550 - protein, 11 aa, Homo sapiens
  AACR GENIE Results; APC_p.S1415Rfs*4; B4002
SEPCSGMVRAL

SEQ ID NO: 21551 - protein, 8 aa, Homo sapiens
  AACR GENIE Results; APC_p.S1415Rfs*4; C1601
CSGMVRAL

SEQ ID NO: 21552 - protein, 9 aa, Homo sapiens
  AACR GENIE Results; APC_p.S1421Vfs*52; A6802
IISPVIFQI

SEQ ID NO: 21553 - protein, 9 aa, Homo sapiens
  AACR GENIE Results; APC_p.S1421Vfs*52; B1302
IISPVIFQI

SEQ ID NO: 21554 - protein, 9 aa, Homo sapiens
  AACR GENIE Results; APC_p.S1421Vfs*52; A0201
IISPVIFQI

SEQ ID NO: 21555 - protein, 9 aa, Homo sapiens
  AACR GENIE Results; APC_p.S1421Vfs*52; C1502
IISPVIFQI

SEQ ID NO: 21556 - protein, 9 aa, Homo sapiens
  AACR GENIE Results; APC_p.S1421Vfs*52; B1501
KQLKPSEKY

SEQ ID NO: 21557 - protein, 9 aa, Homo sapiens
  AACR GENIE Results; APC_p.S1421Vfs*52; C1701
IISPVIFQI

SEQ ID NO: 21558 - protein, 9 aa, Homo sapiens
  AACR GENIE Results; APC_p.S1421Vfs*52; B5701
IISPVIFQI

SEQ ID NO: 21559 - protein, 9 aa, Homo sapiens
  AACR GENIE Results; APC_p.S1421Vfs*52; C0704
IISPVIFQI

SEQ ID NO: 21560 - protein, 9 aa, Homo sapiens
  AACR GENIE Results; APC_p.S1421Vfs*52; A2301
KYLKIKHLL

SEQ ID NO: 21561 - protein, 9 aa, Homo sapiens
  AACR GENIE Results; APC_p.S1421Vfs*52; B3503
SPVIFQIAL

SEQ ID NO: 21562 - protein, 9 aa, Homo sapiens
  AACR GENIE Results; APC_p.S1421Vfs*52; C0202
IISPVIFQI

SEQ ID NO: 21563 - protein, 10 aa, Homo sapiens
  AACR GENIE Results; APC_p.S1421Vfs*52; A2301
KYLKIKHLLL

SEQ ID NO: 21564 - protein, 9 aa, Homo sapiens
  AACR GENIE Results; APC_p.S1421Vfs*52; B4403
AEVKHLHHL

SEQ ID NO: 21565 - protein, 9 aa, Homo sapiens
  AACR GENIE Results; APC_p.S1421Vfs*52; B0702
KPSEKYLKI

SEQ ID NO: 21566 - protein, 9 aa, Homo sapiens
  AACR GENIE Results; APC_p.S1421Vfs*52; C1203
IISPVIFQI

SEQ ID NO: 21567 - protein, 9 aa, Homo sapiens
  AACR GENIE Results; APC_p.S1421Vfs*52; B3503
IISPVIFQI

SEQ ID NO: 21568 - protein, 9 aa, Homo sapiens
  AACR GENIE Results; APC_p.S1421Vfs*52; C0303
IISPVIFQI

SEQ ID NO: 21569 - protein, 9 aa, Homo sapiens
  AACR GENIE Results; APC_p.S1421Vfs*52; B4002
AEVKHLHHL

SEQ ID NO: 21570 - protein, 9 aa, Homo sapiens
  AACR GENIE Results; APC_p.S1421Vfs*52; B0702
SPVIFQIAL

SEQ ID NO: 21571 - protein, 9 aa, Homo sapiens
  AACR GENIE Results; APC_p.S1421Vfs*52; A3001
IISPVIFQI

SEQ ID NO: 21572 - protein, 9 aa, Homo sapiens
  AACR GENIE Results; APC_p.S1421Vfs*52; B3501
SPVIFQIAL

SEQ ID NO: 21573 - protein, 9 aa, Homo sapiens
  AACR GENIE Results; APC_p.S1436Vfs*37; B1501
KQLKPSEKY

SEQ ID NO: 21574 - protein, 9 aa, Homo sapiens
  AACR GENIE Results; APC_p.S1436Vfs*37; A2301
KYLKIKHLL

SEQ ID NO: 21575 - protein, 10 aa, Homo sapiens
  AACR GENIE Results; APC_p.S1436Vfs*37; A2301
KYLKIKHLLL

SEQ ID NO: 21576 - protein, 9 aa, Homo sapiens
  AACR GENIE Results; APC_p.S1436Vfs*37; B0702
KPSEKYLKI

SEQ ID NO: 21577 - protein, 9 aa, Homo sapiens
  AACR GENIE Results; APC_p.S1495Kfs*19; C1502
YSRWIFLFI

SEQ ID NO: 21578 - protein, 9 aa, Homo sapiens
  AACR GENIE Results; APC_p.S1495Kfs*19; A3101
IQPECSEPR

SEQ ID NO: 21579 - protein, 9 aa, Homo sapiens
  AACR GENIE Results; APC_p.S1495Kfs*19; A2301
KYSRWIFLF

SEQ ID NO: 21580 - protein, 9 aa, Homo sapiens
  AACR GENIE Results; APC_p.S1495Kfs*19; A6801
IQPECSEPR

SEQ ID NO: 21581 - protein, 9 aa, Homo sapiens
  AACR GENIE Results; APC_p.S1495Kfs*19; A1101
IQPECSEPR

SEQ ID NO: 21582 - protein, 9 aa, Homo sapiens
  AACR GENIE Results; APC_p.S1495Kfs*19; B1501
LLHFATEKY

SEQ ID NO: 21583 - protein, 9 aa, Homo sapiens
  AACR GENIE Results; APC_p.S1495Vfs*12; A0201
QMDFLVHPA

SEQ ID NO: 21584 - protein, 8 aa, Homo sapiens
  AACR GENIE Results; APC_p.S1495Vfs*12; B1801
TEVLQMDF

SEQ ID NO: 21585 - protein, 9 aa, Homo sapiens
  AACR GENIE Results; APC_p.S1495Vfs*12; A0201
TLLHFATEV

SEQ ID NO: 21586 - protein, 9 aa, Homo sapiens
  AACR GENIE Results; APC_p.S1495Vfs*12; B4001
TEVLQMDFL

SEQ ID NO: 21587 - protein, 9 aa, Homo sapiens
  AACR GENIE Results; APC_p.S1495Vfs*12; A6802
QMDFLVHPA

SEQ ID NO: 21588 - protein, 8 aa, Homo sapiens
  AACR GENIE Results; APC_p.S1495Vfs*12; B4002
MDFLVHPA

SEQ ID NO: 21589 - protein, 9 aa, Homo sapiens
  AACR GENIE Results; APC_p.S1495Vfs*12; B1302
TLLHFATEV

SEQ ID NO: 21590 - protein, 9 aa, Homo sapiens
  AACR GENIE Results; APC_p.S1495Vfs*12; B4901
TEVLQMDFL

SEQ ID NO: 21591 - protein, 10 aa, Homo sapiens
  AACR GENIE Results; APC_p.S1495Vfs*12; A0201
LQMDFLVHPA

SEQ ID NO: 21592 - protein, 8 aa, Homo sapiens
  AACR GENIE Results; APC_p.S1495Vfs*12; B4002
TEVLQMDF

SEQ ID NO: 21593 - protein, 9 aa, Homo sapiens
  AACR GENIE Results; APC_p.S1495Vfs*12; B4002
TEVLQMDFL

SEQ ID NO: 21594 - protein, 9 aa, Homo sapiens
  AACR GENIE Results; APC_p.S1495Vfs*12; A6802
EVLQMDFLV

SEQ ID NO: 21595 - protein, 9 aa, Homo sapiens
  AACR GENIE Results; APC_p.S1495Vfs*12; C1402
HFATEVLQM

SEQ ID NO: 21596 - protein, 9 aa, Homo sapiens
  AACR GENIE Results; APC_p.S1495Vfs*12; A0101
ATEVLQMDF

SEQ ID NO: 21597 - protein, 8 aa, Homo sapiens
  AACR GENIE Results; APC_p.S1495Vfs*12; B1801
MDFLVHPA

SEQ ID NO: 21598 - protein, 9 aa, Homo sapiens
  AACR GENIE Results; APC_p.S1495Vfs*12; A3101
QMDFLVHPA

SEQ ID NO: 21599 - protein, 10 aa, Homo sapiens
  AACR GENIE Results; APC_p.S1495Vfs*12; B3501
FATEVLQMDF

SEQ ID NO: 21600 - protein, 8 aa, Homo sapiens
  AACR GENIE Results; APC_p.S1501Lfs*6; B1801
DGFLVHPA

SEQ ID NO: 21601 - protein, 11 aa, Homo sapiens
  AACR GENIE Results; APC_p.S1501Lfs*6; A0201
STPDGFLVHPA

SEQ ID NO: 21602 - protein, 9 aa, Homo sapiens
  AACR GENIE Results; APC_p.S1501Lfs*6; B4001
TESTPDGFL

SEQ ID NO: 21603 - protein, 10 aa, Homo sapiens
  AACR GENIE Results; APC_p.S1501Lfs*6; B5501
TPDGFLVHPA

SEQ ID NO: 21604 - protein, 9 aa, Homo sapiens
  AACR GENIE Results; APC_p.S1501Lfs*6; A1101
STPDGFLVH

SEQ ID NO: 21605 - protein, 10 aa, Homo sapiens
  AACR GENIE Results; APC_p.S1501Lfs*6; A6801
TPDGFLVHPA

SEQ ID NO: 21606 - protein, 8 aa, Homo sapiens
  AACR GENIE Results; APC_p.S1501Lfs*6; B5101
DGFLVHPA

SEQ ID NO: 21607 - protein, 9 aa, Homo sapiens
  AACR GENIE Results; APC_p.S1501Lfs*6; B4901
TESTPDGFL

SEQ ID NO: 21608 - protein, 9 aa, Homo sapiens
  AACR GENIE Results; APC_p.S1581Lfs*69; B1501
SQPRLLQNY

SEQ ID NO: 21609 - protein, 9 aa, Homo sapiens
  AACR GENIE Results; APC_p.S1581Lfs*69; B5101
LPCQQSHHV

SEQ ID NO: 21610 - protein, 9 aa, Homo sapiens
  AACR GENIE Results; APC_p.S1581Lfs*69; B0702
QPRLLQNYL

SEQ ID NO: 21611 - protein, 10 aa, Homo sapiens
  AACR GENIE Results; APC_p.S1581Lfs*69; B5701
RLLQNYLHLW

SEQ ID NO: 21612 - protein, 8 aa, Homo sapiens
  AACR GENIE Results; APC_p.S1581Lfs*69; B0801
NPKSMLVL

SEQ ID NO: 21613 - protein, 8 aa, Homo sapiens
  AACR GENIE Results; APC_p.S1581Lfs*69; B0702
NPKSMLVL

SEQ ID NO: 21614 - protein, 9 aa, Homo sapiens
  AACR GENIE Results; APC_p.S1581Lfs*69; A3101
HVKQKSQPR

SEQ ID NO: 21615 - protein, 10 aa, Homo sapiens
  AACR GENIE Results; APC_p.S1581Lfs*69; A0301
GCNPKSMLVL

SEQ ID NO: 21616 - protein, 10 aa, Homo sapiens
  AACR GENIE Results; APC_p.S1581Lfs*69; B5701
KSQPRLLQNY

SEQ ID NO: 21617 - protein, 10 aa, Homo sapiens
  AACR GENIE Results; APC_p.S1581Lfs*69; A0201
HLWQGNQVSC

SEQ ID NO: 21618 - protein, 9 aa, Homo sapiens
  AACR GENIE Results; APC_p.S299Cfs*27; B5701
GVFIVVNAW

SEQ ID NO: 21619 - protein, 9 aa, Homo sapiens
  AACR GENIE Results; APC_p.S299Cfs*27; B1302
NQGGNGVFI

SEQ ID NO: 21620 - protein, 9 aa, Homo sapiens
  AACR GENIE Results; APC_p.S299Cfs*27; B1302
GGNGVFIVV

SEQ ID NO: 21621 - protein, 9 aa, Homo sapiens
  AACR GENIE Results; APC_p.S299Cfs*27; B3801
NQGGNGVFI

SEQ ID NO: 21622 - protein, 8 aa, Homo sapiens
  AACR GENIE Results; APC_p.S299Cfs*27; A2301
VFIVVNAW

SEQ ID NO: 21623 - protein, 9 aa, Homo sapiens
  AACR GENIE Results; APC_p.S299Cfs*27; A2902
VFIVVNAWY

SEQ ID NO: 21624 - protein, 9 aa, Homo sapiens
  AACR GENIE Results; APC_p.S770Qfs*7; B3801
QHLQKLLTI

SEQ ID NO: 21625 - protein, 11 aa, Homo sapiens
  AACR GENIE Results; APC_p.S770Qfs*7; B4001
AELDAQHLQKL

SEQ ID NO: 21626 - protein, 11 aa, Homo sapiens
  AACR GENIE Results; APC_p.S770Qfs*7; B4403
AELDAQHLQKL

SEQ ID NO: 21627 - protein, 8 aa, Homo sapiens
  AACR GENIE Results; APC_p.S770Qfs*7; B5101
DAQHLQKL

SEQ ID NO: 21628 - protein, 9 aa, Homo sapiens
  AACR GENIE Results; APC_p.S770Qfs*7; B4403
AELDAQHLQ

SEQ ID NO: 21629 - protein, 9 aa, Homo sapiens
  AACR GENIE Results; APC_p.S770Qfs*7; B4402
AELDAQHLQ

SEQ ID NO: 21630 - protein, 11 aa, Homo sapiens
  AACR GENIE Results; APC_p.S770Qfs*7; B4402
AELDAQHLQKL

SEQ ID NO: 21631 - protein, 9 aa, Homo sapiens
  AACR GENIE Results; APC_p.S770Qfs*7; A2301
QHLQKLLTI

SEQ ID NO: 21632 - protein, 9 aa, Homo sapiens
  AACR GENIE Results; APC_p.S770Qfs*7; B0801
QHLQKLLTI

SEQ ID NO: 21633 - protein, 10 aa, Homo sapiens
  AACR GENIE Results; APC_p.S770Qfs*7; B4403
AELDAQHLQK

SEQ ID NO: 21634 - protein, 9 aa, Homo sapiens
  AACR GENIE Results; APC_p.T1023Nfs*6; B4001
GELDNTNKL

SEQ ID NO: 21635 - protein, 9 aa, Homo sapiens
  AACR GENIE Results; APC_p.T1023Nfs*6; B4403
GELDNTNKL

SEQ ID NO: 21636 - protein, 9 aa, Homo sapiens
  AACR GENIE Results; APC_p.T1023Nfs*6; B4402
GELDNTNKL

SEQ ID NO: 21637 - protein, 8 aa, Homo sapiens
  AACR GENIE Results; APC_p.T1023Nfs*6; C0802
ELDNTNKL

SEQ ID NO: 21638 - protein, 8 aa, Homo sapiens
  AACR GENIE Results; APC_p.T1023Nfs*6; C0501
ELDNTNKL

SEQ ID NO: 21639 - protein, 9 aa, Homo sapiens
  AACR GENIE Results; APC_p.T1023Nfs*6; B0702
GELDNTNKL

SEQ ID NO: 21640 - protein, 9 aa, Homo sapiens
  AACR GENIE Results; APC_p.T1023Nfs*6; A2301
GELDNTNKL

SEQ ID NO: 21641 - protein, 9 aa, Homo sapiens
  AACR GENIE Results; APC_p.T1023Nfs*6; B1501
GELDNTNKL

SEQ ID NO: 21642 - protein, 8 aa, Homo sapiens
  AACR GENIE Results; APC_p.T1023Nfs*6; C0401
ELDNTNKL

SEQ ID NO: 21643 - protein, 9 aa, Homo sapiens
  AACR GENIE Results; APC_p.T1023Nfs*6; B3801
GELDNTNKL

SEQ ID NO: 21644 - protein, 8 aa, Homo sapiens
  AACR GENIE Results; APC_p.T1023Nfs*6; A0101
ELDNTNKL

SEQ ID NO: 21645 - protein, 11 aa, Homo sapiens
  AACR GENIE Results; APC_p.T1301Sfs*10; A6801
TTQEADSANSR

SEQ ID NO: 21646 - protein, 11 aa, Homo sapiens
  AACR GENIE Results; APC_p.T1301Sfs*10; A3101
TTQEADSANSR

SEQ ID NO: 21647 - protein, 11 aa, Homo sapiens
  AACR GENIE Results; APC_p.T1301Sfs*10; A1101
TTQEADSANSR

SEQ ID NO: 21648 - protein, 9 aa, Homo sapiens
  AACR GENIE Results; APC_p.T1438Hfs*35; B1501
KQLKPSEKY

SEQ ID NO: 21649 - protein, 9 aa, Homo sapiens
  AACR GENIE Results; APC_p.T1438Hfs*35; A2301
KYLKIKHLL

SEQ ID NO: 21650 - protein, 10 aa, Homo sapiens
  AACR GENIE Results; APC_p.T1438Hfs*35; A2301
KYLKIKHLLL

SEQ ID NO: 21651 - protein, 9 aa, Homo sapiens
  AACR GENIE Results; APC_p.T1438Hfs*35; B0702
KPSEKYLKI

SEQ ID NO: 21652 - protein, 9 aa, Homo sapiens
  AACR GENIE Results; APC_p.T1445Qfs*28; B1501
QQLKPSEKY

SEQ ID NO: 21653 - protein, 9 aa, Homo sapiens
  AACR GENIE Results; APC_p.T1445Qfs*28; B0702
KPSEKYLKI

SEQ ID NO: 21654 - protein, 9 aa, Homo sapiens
  AACR GENIE Results; APC_p.T1487Ifs*25; C1502
YSRWIFLFI

SEQ ID NO: 21655 - protein, 9 aa, Homo sapiens
  AACR GENIE Results; APC_p.T1487Ifs*25; A2301
KYSRWIFLF

SEQ ID NO: 21656 - protein, 9 aa, Homo sapiens
  AACR GENIE Results; APC_p.T1487Ifs*25; A3101
IQPECSEPR

SEQ ID NO: 21657 - protein, 9 aa, Homo sapiens
  AACR GENIE Results; APC_p.T1487Ifs*25; A6801
IQPECSEPR

SEQ ID NO: 21658 - protein, 9 aa, Homo sapiens
  AACR GENIE Results; APC_p.T1487Ifs*25; A1101
IQPECSEPR

SEQ ID NO: 21659 - protein, 10 aa, Homo sapiens
  AACR GENIE Results; APC_p.T1487Nfs*27; B3501
LPDADNFITF

SEQ ID NO: 21660 - protein, 9 aa, Homo sapiens
  AACR GENIE Results; APC_p.T1487Nfs*27; C1502
YSRWIFLFI

SEQ ID NO: 21661 - protein, 9 aa, Homo sapiens
  AACR GENIE Results; APC_p.T1487Nfs*27; A2301
KYSRWIFLF

SEQ ID NO: 21662 - protein, 9 aa, Homo sapiens
  AACR GENIE Results; APC_p.T1487Nfs*27; A3101
IQPECSEPR

SEQ ID NO: 21663 - protein, 9 aa, Homo sapiens
  AACR GENIE Results; APC_p.T1487Nfs*27; A6801
IQPECSEPR

SEQ ID NO: 21664 - protein, 9 aa, Homo sapiens
  AACR GENIE Results; APC_p.T1487Nfs*27; A1101
IQPECSEPR

SEQ ID NO: 21665 - protein, 8 aa, Homo sapiens
  AACR GENIE Results; APC_p.T1487Nfs*27; B3501
DADNFITF

SEQ ID NO: 21666 - protein, 9 aa, Homo sapiens
  AACR GENIE Results; APC_p.T1487Yfs*18; A0201
QMDFLVHPA

SEQ ID NO: 21667 - protein, 8 aa, Homo sapiens
  AACR GENIE Results; APC_p.T1487Yfs*18; B1801
MDFLVHPA

SEQ ID NO: 21668 - protein, 8 aa, Homo sapiens
  AACR GENIE Results; APC_p.T1493Rfs*14; B3701
MDFLVHPA

SEQ ID NO: 21669 - protein, 9 aa, Homo sapiens
  AACR GENIE Results; APC_p.T1493Rfs*14; A0201
QMDFLVHPA

SEQ ID NO: 21670 - protein, 8 aa, Homo sapiens
  AACR GENIE Results; APC_p.T1493Rfs*14; B4002
MDFLVHPA

SEQ ID NO: 21671 - protein, 9 aa, Homo sapiens
  AACR GENIE Results; APC_p.T1493Rfs*14; A6802
QMDFLVHPA

SEQ ID NO: 21672 - protein, 8 aa, Homo sapiens
  AACR GENIE Results; APC_p.T1493Rfs*14; B1801
MDFLVHPA

SEQ ID NO: 21673 - protein, 9 aa, Homo sapiens
  AACR GENIE Results; APC_p.T1493Rfs*14; A3101
QMDFLVHPA

SEQ ID NO: 21674 - protein, 9 aa, Homo sapiens
  AACR GENIE Results; APC_p.T1556Lfs*9; A6801
EAEKLLILK

SEQ ID NO: 21675 - protein, 9 aa, Homo sapiens
  AACR GENIE Results; APC_p.T1556Lfs*9; B4001
KEAEKLLIL

SEQ ID NO: 21676 - protein, 9 aa, Homo sapiens
  AACR GENIE Results; APC_p.T1556Nfs*3; B4403
QEKEAEKNY

SEQ ID NO: 21677 - protein, 9 aa, Homo sapiens
  AACR GENIE Results; APC_p.T1556Nfs*3; B4402
QEKEAEKNY

SEQ ID NO: 21678 - protein, 9 aa, Homo sapiens
  AACR GENIE Results; APC_p.T1556Nfs*3; B4102
QEKEAEKNY

SEQ ID NO: 21679 - protein, 9 aa, Homo sapiens
  AACR GENIE Results; APC_p.T1556Nfs*3; B4405
QEKEAEKNY

SEQ ID NO: 21680 - protein, 9 aa, Homo sapiens
  AACR GENIE Results; APC_p.T1556Nfs*3; A2301
QEKEAEKNY

SEQ ID NO: 21681 - protein, 9 aa, Homo sapiens
  AACR GENIE Results; APC_p.V1452Yfs*21; A2301
EYLKIKHLL

SEQ ID NO: 21682 - protein, 9 aa, Homo sapiens
  AACR GENIE Results; APC_p.V1452Yfs*21; A2402
EYLKIKHLL

SEQ ID NO: 21683 - protein, 10 aa, Homo sapiens
  AACR GENIE Results; APC_p.V1452Yfs*21; A2301
EYLKIKHLLL

SEQ ID NO: 21684 - protein, 10 aa, Homo sapiens
  AACR GENIE Results; APC_p.V1452Yfs*21; A2402
EYLKIKHLLL

SEQ ID NO: 21685 - protein, 8 aa, Homo sapiens
  AACR GENIE Results; APC_p.Y935Ifs*19; B3901
THSNTISL

SEQ ID NO: 21686 - protein, 9 aa, Homo sapiens
  AACR GENIE Results; APC_p.Y935Ifs*19; A3303
HSNTISLSR

SEQ ID NO: 21687 - protein, 9 aa, Homo sapiens
  AACR GENIE Results; APC_p.Y935Ifs*19; A6801
HSNTISLSR

SEQ ID NO: 21688 - protein, 8 aa, Homo sapiens
  AACR GENIE Results; APC_p.Y935Ifs*19; B3801
THSNTISL

SEQ ID NO: 21689 - protein, 9 aa, Homo sapiens
  AACR GENIE Results; APC_p.Y935Ifs*19; A3301
HSNTISLSR

SEQ ID NO: 21690 - protein, 9 aa, Homo sapiens
  AACR GENIE Results; APC_p.Y935Ifs*19; B1302
IQIGHVLCL

SEQ ID NO: 21691 - protein, 9 aa, Homo sapiens
  AACR GENIE Results; APC_p.Y935Ifs*19; A3101
HSNTISLSR

SEQ ID NO: 21692 - protein, 9 aa, Homo sapiens
  AACR GENIE Results; APC_p.Y935Ifs*19; C0304
HTHSNTISL

SEQ ID NO: 21693 - protein, 9 aa, Homo sapiens
  AACR GENIE Results; APC_p.Y935Ifs*19; A3001
HTHSNTISL

SEQ ID NO: 21694 - protein, 9 aa, Homo sapiens
  AACR GENIE Results; APC_p.Y935Ifs*19; B1501
IQIGHVLCL

SEQ ID NO: 21695 - protein, 9 aa, Homo sapiens
  AACR GENIE Results; APC_p.Y935Ifs*19; A6802
HTHSNTISL

SEQ ID NO: 21696 - protein, 9 aa, Homo sapiens
  AACR GENIE Results; APC_p.Y935Ifs*19; B4002
HTHSNTISL

SEQ ID NO: 21697 - protein, 9 aa, Homo sapiens
  AACR GENIE Results; APC_p.Y935Ifs*19; B3503
HTHSNTISL

SEQ ID NO: 21698 - protein, 11 aa, Homo sapiens
  AACR GENIE Results; APC_p.Y935Ifs*19; A3303
HTHSNTISLSR

SEQ ID NO: 21699 - protein, 11 aa, Homo sapiens
  AACR GENIE Results; APC_p.Y935Ifs*19; A6801
HTHSNTISLSR

SEQ ID NO: 21700 - protein, 9 aa, Homo sapiens
  AACR GENIE Results; AR_p.A597T; A3101
KQKYLCTSR

SEQ ID NO: 21701 - protein, 9 aa, Homo sapiens
  AACR GENIE Results; AR_p.F814V; B5801
VSIIPVDGL

SEQ ID NO: 21702 - protein, 10 aa, Homo sapiens
  AACR GENIE Results; AR_p.F814V; A6802
LVSIIPVDGL

SEQ ID NO: 21703 - protein, 9 aa, Homo sapiens
  AACR GENIE Results; AR_p.F814V; C0304
VSIIPVDGL

SEQ ID NO: 21704 - protein, 9 aa, Homo sapiens
  AACR GENIE Results; AR_p.F814V; B1501
VSIIPVDGL

SEQ ID NO: 21705 - protein, 9 aa, Homo sapiens
  AACR GENIE Results; AR_p.F814V; B4001
VSIIPVDGL

SEQ ID NO: 21706 - protein, 9 aa, Homo sapiens
  AACR GENIE Results; AR_p.F814V; C0303
VSIIPVDGL

SEQ ID NO: 21707 - protein, 9 aa, Homo sapiens
  AACR GENIE Results; AR_p.F814V; A0201
LLLVSIIPV

SEQ ID NO: 21708 - protein, 9 aa, Homo sapiens
  AACR GENIE Results; AR_p.R609M; A1101
CTIDKFRMK

SEQ ID NO: 21709 - protein, 9 aa, Homo sapiens
  AACR GENIE Results; AR_p.R609M; A0301
CTIDKFRMK

SEQ ID NO: 21710 - protein, 9 aa, Homo sapiens
  AACR GENIE Results; ARAF_p.F101C; B5101
VPLTMHNCV

SEQ ID NO: 21711 - protein, 9 aa, Homo sapiens
  AACR GENIE Results; ARID1A_p.A167dup; B1501
AAAAAAAVF

SEQ ID NO: 21712 - protein, 9 aa, Homo sapiens
  AACR GENIE Results; ARID1A_p.A167dup; B3501
AAAAAAAVF

SEQ ID NO: 21713 - protein, 9 aa, Homo sapiens
  AACR GENIE Results; ARID1A_p.A167dup; C0303
AAAAAAAVF

SEQ ID NO: 21714 - protein, 11 aa, Homo sapiens
  AACR GENIE Results; ARID1A_p.A167dup; B1501
AVAAAAAAAVF

SEQ ID NO: 21715 - protein, 9 aa, Homo sapiens
  AACR GENIE Results; ARID1A_p.A167dup; C0304
AAAAAAAVF

SEQ ID NO: 21716 - protein, 9 aa, Homo sapiens
  AACR GENIE Results; ARID1A_p.A167dup; C0202
AAAAAAAVF

SEQ ID NO: 21717 - protein, 9 aa, Homo sapiens
  AACR GENIE Results; ARID1A_p.A167dup; C1203
AAAAAAAVF

SEQ ID NO: 21718 - protein, 9 aa, Homo sapiens
  AACR GENIE Results; ARID1A_p.A167dup; B0702
AAAAAAAVF

SEQ ID NO: 21719 - protein, 9 aa, Homo sapiens
  AACR GENIE Results; ARID1A_p.A167dup; B5101
VAAAAAAAV

SEQ ID NO: 21720 - protein, 9 aa, Homo sapiens
  AACR GENIE Results; ARID1A_p.A167dup; C1601
AAAAAAAVF

SEQ ID NO: 21721 - protein, 10 aa, Homo sapiens
  AACR GENIE Results; ARID1A_p.A167dup; B3501
VAAAAAAAVF

SEQ ID NO: 21722 - protein, 10 aa, Homo sapiens
  AACR GENIE Results; ARID1A_p.A167dup; B1501
VAAAAAAAVF

SEQ ID NO: 21723 - protein, 11 aa, Homo sapiens
  AACR GENIE Results; ARID1A_p.A167dup; B3501
AVAAAAAAAVF

SEQ ID NO: 21724 - protein, 10 aa, Homo sapiens
  AACR GENIE Results; ARID1A_p.A167dup; C0303
VAAAAAAAVF

SEQ ID NO: 21725 - protein, 9 aa, Homo sapiens
  AACR GENIE Results; ARID1A_p.A167dup; A3201
AAAAAAAVF

SEQ ID NO: 21726 - protein, 11 aa, Homo sapiens
  AACR GENIE Results; ARID1A_p.A45dup; A6801
EAAAAAAAAER

SEQ ID NO: 21727 - protein, 10 aa, Homo sapiens
  AACR GENIE Results; ARID1A_p.A45dup; A6801
AAAAAAAAER

SEQ ID NO: 21728 - protein, 9 aa, Homo sapiens
  AACR GENIE Results; ARID1A_p.E2250Rfs*28; A2601
ELIGFTSHL

SEQ ID NO: 21729 - protein, 9 aa, Homo sapiens
  AACR GENIE Results; ARID1A_p.E2250Rfs*28; B1801
DELIGFTSH

SEQ ID NO: 21730 - protein, 8 aa, Homo sapiens
  AACR GENIE Results; ARID1A_p.E2250Rfs*28; B1801
DENHSRVY

SEQ ID NO: 21731 - protein, 9 aa, Homo sapiens
  AACR GENIE Results; ARID1A_p.E2250Rfs*28; A0201
ELIGFTSHL

SEQ ID NO: 21732 - protein, 9 aa, Homo sapiens
  AACR GENIE Results; ARID1A_p.E2250Rfs*28; B0801
ELIGFTSHL

SEQ ID NO: 21733 - protein, 9 aa, Homo sapiens
  AACR GENIE Results; ARID1A_p.E2250Rfs*28; C0102
ELIGFTSHL

SEQ ID NO: 21734 - protein, 10 aa, Homo sapiens
  AACR GENIE Results; ARID1A_p.E2250Rfs*28; B3801
GHLGITVDEL

SEQ ID NO: 21735 - protein, 9 aa, Homo sapiens
  AACR GENIE Results; ARID1A_p.E2250Rfs*28; A6801
ELIGFTSHL

SEQ ID NO: 21736 - protein, 9 aa, Homo sapiens
  AACR GENIE Results; ARID1A_p.E2250Rfs*28; B1501
ELIGFTSHL

SEQ ID NO: 21737 - protein, 9 aa, Homo sapiens
  AACR GENIE Results; ARID1A_p.E2250Rfs*28; B0801
ENHSRVYSV

SEQ ID NO: 21738 - protein, 9 aa, Homo sapiens
  AACR GENIE Results; ARID1A_p.E2250Rfs*28; B1302
ELIGFTSHL

SEQ ID NO: 21739 - protein, 9 aa, Homo sapiens
  AACR GENIE Results; ARID1A_p.E2250Rfs*28; B5701
ITVDELIGF

SEQ ID NO: 21740 - protein, 9 aa, Homo sapiens
  AACR GENIE Results; ARID1A_p.E2250Rfs*28; A2301
ELIGFTSHL

SEQ ID NO: 21741 - protein, 9 aa, Homo sapiens
  AACR GENIE Results; ARID1A_p.E2250Rfs*28; C1601
VYSVRITAV

SEQ ID NO: 21742 - protein, 9 aa, Homo sapiens
  AACR GENIE Results; ARID1A_p.E2250Rfs*28; B0801
VYSVRITAV

SEQ ID NO: 21743 - protein, 9 aa, Homo sapiens
  AACR GENIE Results; ARID1A_p.E2250Rfs*28; A2402
VYSVRITAV

SEQ ID NO: 21744 - protein, 8 aa, Homo sapiens
  AACR GENIE Results; ARID1A_p.E2250Rfs*28; B5101
TAVGHLGI

SEQ ID NO: 21745 - protein, 9 aa, Homo sapiens
  AACR GENIE Results; ARID1A_p.E2250Rfs*28; B3801
ELIGFTSHL

SEQ ID NO: 21746 - protein, 9 aa, Homo sapiens
  AACR GENIE Results; ARID1A_p.E2250Rfs*28; C0602
VRITAVGHL

SEQ ID NO: 21747 - protein, 10 aa, Homo sapiens
  AACR GENIE Results; ARID1A_p.E2250Rfs*28; A0301
SVRITAVGHL

SEQ ID NO: 21748 - protein, 8 aa, Homo sapiens
  AACR GENIE Results; ARID1A_p.E2250Rfs*28; B1801
DELIGFTS

SEQ ID NO: 21749 - protein, 9 aa, Homo sapiens
  AACR GENIE Results; ARID1A_p.E2250Rfs*28; B2705
VRITAVGHL

SEQ ID NO: 21750 - protein, 10 aa, Homo sapiens
  AACR GENIE Results; ARID1A_p.E2250Rfs*28; B0702
SVRITAVGHL

SEQ ID NO: 21751 - protein, 9 aa, Homo sapiens
  AACR GENIE Results; ARID1A_p.E2250Rfs*28; A2601
ITVDELIGF

SEQ ID NO: 21752 - protein, 8 aa, Homo sapiens
  AACR GENIE Results; ARID1A_p.E2250Rfs*28; B5101
VGHLGITV

SEQ ID NO: 21753 - protein, 8 aa, Homo sapiens
  AACR GENIE Results; ARID1A_p.E2250Rfs*28; C1203
YSVRITAV

SEQ ID NO: 21754 - protein, 8 aa, Homo sapiens
  AACR GENIE Results; ARID1A_p.E2250Rfs*28; B0801
LIGFTSHL

SEQ ID NO: 21755 - protein, 9 aa, Homo sapiens
  AACR GENIE Results; ARID1A_p.E2250Rfs*28; A2902
ELIGFTSHL

SEQ ID NO: 21756 - protein, 8 aa, Homo sapiens
  AACR GENIE Results; ARID1A_p.E2250Rfs*28; C1502
LIGFTSHL

SEQ ID NO: 21757 - protein, 9 aa, Homo sapiens
  AACR GENIE Results; ARID1A_p.E2250Rfs*28; A3001
ELIGFTSHL

SEQ ID NO: 21758 - protein, 9 aa, Homo sapiens
  AACR GENIE Results; ARID1A_p.E2250Rfs*28; A2301
VYSVRITAV

SEQ ID NO: 21759 - protein, 9 aa, Homo sapiens
  AACR GENIE Results; ARID1A_p.E2250Rfs*28; B4403
ELIGFTSHL

SEQ ID NO: 21760 - protein, 9 aa, Homo sapiens
  AACR GENIE Results; ARID1A_p.E2250Rfs*28; B1402
ENHSRVYSV

SEQ ID NO: 21761 - protein, 8 aa, Homo sapiens
  AACR GENIE Results; ARID1A_p.E2250Rfs*28; B1302
YSVRITAV

SEQ ID NO: 21762 - protein, 8 aa, Homo sapiens
  AACR GENIE Results; ARID1A_p.E2250Rfs*28; B5101
YSVRITAV

SEQ ID NO: 21763 - protein, 9 aa, Homo sapiens
  AACR GENIE Results; ARID1A_p.E2250Rfs*28; A3101
ELIGFTSHL

SEQ ID NO: 21764 - protein, 8 aa, Homo sapiens
  AACR GENIE Results; ARID1A_p.E2250Rfs*28; C0501
TVDELIGF

SEQ ID NO: 21765 - protein, 9 aa, Homo sapiens
  AACR GENIE Results; ARID1A_p.E2250Rfs*28; B1501
ITVDELIGF

SEQ ID NO: 21766 - protein, 9 aa, Homo sapiens
  AACR GENIE Results; ARID1A_p.E2250Rfs*28; A1101
ELIGFTSHL

SEQ ID NO: 21767 - protein, 10 aa, Homo sapiens
  AACR GENIE Results; ARID1A_p.E2250Rfs*28; B1801
DELIGFTSHL

SEQ ID NO: 21768 - protein, 9 aa, Homo sapiens
  AACR GENIE Results; ARID1A_p.E2250Rfs*28; B3501
ELIGFTSHL

SEQ ID NO: 21769 - protein, 8 aa, Homo sapiens
  AACR GENIE Results; ARID1A_p.E2250Rfs*28; B0801
YSVRITAV

SEQ ID NO: 21770 - protein, 8 aa, Homo sapiens
  AACR GENIE Results; ARID1A_p.E2250Rfs*28; C0304
LIGFTSHL

SEQ ID NO: 21771 - protein, 9 aa, Homo sapiens
  AACR GENIE Results; ARID1A_p.E2250Rfs*28; B1402
VRITAVGHL

SEQ ID NO: 21772 - protein, 9 aa, Homo sapiens
  AACR GENIE Results; ARID1A_p.E2250Rfs*28; C0304
ELIGFTSHL

SEQ ID NO: 21773 - protein, 10 aa, Homo sapiens
  AACR GENIE Results; ARID1A_p.M1215I; B0702
TPNPGYQPSI

SEQ ID NO: 21774 - protein, 10 aa, Homo sapiens
  AACR GENIE Results; ARID1A_p.M1215I; B3501
TPNPGYQPSI

SEQ ID NO: 21775 - protein, 9 aa, Homo sapiens
  AACR GENIE Results; ARID1A_p.M1215I; B3501
QPSINTSDM

SEQ ID NO: 21776 - protein, 9 aa, Homo sapiens
  AACR GENIE Results; ARID1A_p.M1215I; B0702
QPSINTSDM

SEQ ID NO: 21777 - protein, 9 aa, Homo sapiens
  AACR GENIE Results; ARID1A_p.M1361V; B3501
FPSQQTTVY

SEQ ID NO: 21778 - protein, 11 aa, Homo sapiens
  AACR GENIE Results; ARID1A_p.M1361V; B3501
SPFPSQQTTVY

SEQ ID NO: 21779 - protein, 11 aa, Homo sapiens
  AACR GENIE Results; ARID1A_p.M1361V; A0301
TVYQQQQQNYK

SEQ ID NO: 21780 - protein, 11 aa, Homo sapiens
  AACR GENIE Results; ARID1A_p.M1361V; A1101
TVYQQQQQNYK

SEQ ID NO: 21781 - protein, 10 aa, Homo sapiens
  AACR GENIE Results; ARID1A_p.M1361V; A2601
TVYQQQQQNY

SEQ ID NO: 21782 - protein, 9 aa, Homo sapiens
  AACR GENIE Results; ARID1A_p.M1361V; A2402
VYQQQQQNY

SEQ ID NO: 21783 - protein, 10 aa, Homo sapiens
  AACR GENIE Results; ARID1A_p.M1361V; B1501
TVYQQQQQNY

SEQ ID NO: 21784 - protein, 10 aa, Homo sapiens
  AACR GENIE Results; ARID1A_p.M1361V; B5101
SPFPSQQTTV

SEQ ID NO: 21785 - protein, 11 aa, Homo sapiens
  AACR GENIE Results; ARID1A_p.M1361V; B1501
SPFPSQQTTVY

SEQ ID NO: 21786 - protein, 10 aa, Homo sapiens
  AACR GENIE Results; ARID1A_p.M1361V; B3501
TVYQQQQQNY

SEQ ID NO: 21787 - protein, 10 aa, Homo sapiens
  AACR GENIE Results; ARID1A_p.M1361V; A0301
TVYQQQQQNY

SEQ ID NO: 21788 - protein, 10 aa, Homo sapiens
  AACR GENIE Results; ARID1A_p.M1361V; B0702
SPFPSQQTTV

SEQ ID NO: 21789 - protein, 8 aa, Homo sapiens
  AACR GENIE Results; ARID1A_p.M1361V; B5101
FPSQQTTV

SEQ ID NO: 21790 - protein, 9 aa, Homo sapiens
  AACR GENIE Results; ARID1A_p.M1361V; B1501
VYQQQQQNY

SEQ ID NO: 21791 - protein, 10 aa, Homo sapiens
  AACR GENIE Results; ARID1A_p.M1361V; A1101
TVYQQQQQNY

SEQ ID NO: 21792 - protein, 9 aa, Homo sapiens
  AACR GENIE Results; ARID1A_p.M1361V; B1501
FPSQQTTVY

SEQ ID NO: 21793 - protein, 8 aa, Homo sapiens
  AACR GENIE Results; ARID1A_p.M1361V; B1501
PSQQTTVY

SEQ ID NO: 21794 - protein, 10 aa, Homo sapiens
  AACR GENIE Results; ARID1A_p.M1361V; A1101
VYQQQQQNYK

SEQ ID NO: 21795 - protein, 11 aa, Homo sapiens
  AACR GENIE Results; ARID1A_p.M1361V; B0702
SPFPSQQTTVY

SEQ ID NO: 21796 - protein, 9 aa, Homo sapiens
  AACR GENIE Results; ARID1A_p.Q507Sfs*116; B5502
FPAALPSTA

SEQ ID NO: 21797 - protein, 8 aa, Homo sapiens
  AACR GENIE Results; ARID1A_p.Q507Sfs*116; B5101
DALPAGCV

SEQ ID NO: 21798 - protein, 11 aa, Homo sapiens
  AACR GENIE Results; ARID1A_p.Q507Sfs*116; B5502
LPAAIPASTSA

SEQ ID NO: 21799 - protein, 9 aa, Homo sapiens
  AACR GENIE Results; ARID1A_p.Q507Sfs*116; C0801
SAASTLDAL

SEQ ID NO: 21800 - protein, 9 aa, Homo sapiens
  AACR GENIE Results; ARID1A_p.Q507Sfs*116; B5502
LPAAATSAA

SEQ ID NO: 21801 - protein, 9 aa, Homo sapiens
  AACR GENIE Results; ARID1A_p.Q507Sfs*116; A2601
STAGAISRF

SEQ ID NO: 21802 - protein, 9 aa, Homo sapiens
  AACR GENIE Results; ARID1A_p.Q507Sfs*116; B3906
TGSVSLPAA

SEQ ID NO: 21803 - protein, 9 aa, Homo sapiens
  AACR GENIE Results; ARID1A_p.Q507Sfs*116; B5501
LPAAATSAA

SEQ ID NO: 21804 - protein, 9 aa, Homo sapiens
  AACR GENIE Results; ARID1A_p.Q507Sfs*116; B5501
FPAALPSTA

SEQ ID NO: 21805 - protein, 9 aa, Homo sapiens
  AACR GENIE Results; ARID1A_p.Q507Sfs*116; C0303
AATSAASTL

SEQ ID NO: 21806 - protein, 9 aa, Homo sapiens
  AACR GENIE Results; ARID1A_p.Q507Sfs*116; C0304
AATSAASTL

SEQ ID NO: 21807 - protein, 10 aa, Homo sapiens
  AACR GENIE Results; ARID1A_p.Q507Sfs*116; A6801
LPSTAGAISR

SEQ ID NO: 21808 - protein, 9 aa, Homo sapiens
  AACR GENIE Results; ARID1A_p.Q507Sfs*116; B3906
FPAALPSTA

SEQ ID NO: 21809 - protein, 9 aa, Homo sapiens
  AACR GENIE Results; ARID1A_p.Q507Sfs*116; B0702
APPEPAPLL

SEQ ID NO: 21810 - protein, 9 aa, Homo sapiens
  AACR GENIE Results; ARID1A_p.Q507Sfs*116; C0303
SSTTTAPVL

SEQ ID NO: 21811 - protein, 11 aa, Homo sapiens
  AACR GENIE Results; ARID1A_p.Q507Sfs*116; B5502
APPEPAPLLTA

SEQ ID NO: 21812 - protein, 11 aa, Homo sapiens
  AACR GENIE Results; ARID1A_p.Q507Sfs*116; B3503
TAAPPEPAPLL

SEQ ID NO: 21813 - protein, 9 aa, Homo sapiens
  AACR GENIE Results; ARID1A_p.Q507Sfs*116; B5502
VPGSIPLPA

SEQ ID NO: 21814 - protein, 9 aa, Homo sapiens
  AACR GENIE Results; ARID1A_p.Q507Sfs*116; C1701
GAISRFIWV

SEQ ID NO: 21815 - protein, 9 aa, Homo sapiens
  AACR GENIE Results; ARID1A_p.Q507Sfs*116; B3503
FPAALPSTA

SEQ ID NO: 21816 - protein, 9 aa, Homo sapiens
  AACR GENIE Results; ARID1A_p.Q507Sfs*116; B3503
SAASTLDAL

SEQ ID NO: 21817 - protein, 9 aa, Homo sapiens
  AACR GENIE Results; ARID1A_p.Q507Sfs*116; B5101
TAPVLSASI

SEQ ID NO: 21818 - protein, 10 aa, Homo sapiens
  AACR GENIE Results; ARID1A_p.Q507Sfs*116; B5502
VPGSIPLPAV

SEQ ID NO: 21819 - protein, 9 aa, Homo sapiens
  AACR GENIE Results; ARID1A_p.Q507Sfs*116; B0702
APVLSASIL

SEQ ID NO: 21820 - protein, 9 aa, Homo sapiens
  AACR GENIE Results; ARID1A_p.Q507Sfs*116; B3502
TAAPPEPAP

SEQ ID NO: 21821 - protein, 10 aa, Homo sapiens
  AACR GENIE Results; ARID1A_p.Q507Sfs*116; B5502
VPANCLFPAA

SEQ ID NO: 21822 - protein, 9 aa, Homo sapiens
  AACR GENIE Results; ARID1A_p.Q507Sfs*116; B5502
LPAAIPAST

SEQ ID NO: 21823 - protein, 9 aa, Homo sapiens
  AACR GENIE Results; ARID1A_p.Q507Sfs*116; B3503
APVLSASIL

SEQ ID NO: 21824 - protein, 9 aa, Homo sapiens
  AACR GENIE Results; ARID1A_p.Q507Sfs*116; C0102
AIPASTSAV

SEQ ID NO: 21825 - protein, 10 aa, Homo sapiens
  AACR GENIE Results; ARID1A_p.Q507Sfs*116; B2702
LPSTAGAISR

SEQ ID NO: 21826 - protein, 9 aa, Homo sapiens
  AACR GENIE Results; ARID1A_p.Q507Sfs*116; B3503
APPEPAPLL

SEQ ID NO: 21827 - protein, 9 aa, Homo sapiens
  AACR GENIE Results; ARID1A_p.Q507Sfs*116; B3502
APPEPAPLL

SEQ ID NO: 21828 - protein, 9 aa, Homo sapiens
  AACR GENIE Results; ARID1A_p.Q507Sfs*116; B5502
QPQSSTTTA

SEQ ID NO: 21829 - protein, 8 aa, Homo sapiens
  AACR GENIE Results; ARID1A_p.Q507Sfs*116; B5502
LPAAATSA

SEQ ID NO: 21830 - protein, 9 aa, Homo sapiens
  AACR GENIE Results; ARID1A_p.Q507Sfs*116; A0201
TLDALPAGC

SEQ ID NO: 21831 - protein, 9 aa, Homo sapiens
  AACR GENIE Results; ARID1A_p.Q507Sfs*116; B3503
TAAPPEPAP

SEQ ID NO: 21832 - protein, 10 aa, Homo sapiens
  AACR GENIE Results; ARID1A_p.Q507Sfs*116; B3503
TAAPPEPAPL

SEQ ID NO: 21833 - protein, 11 aa, Homo sapiens
  AACR GENIE Results; ARID1A_p.Q507Sfs*116; B5701
STAGAISRFIW

SEQ ID NO: 21834 - protein, 9 aa, Homo sapiens
  AACR GENIE Results; ARID1A_p.Q507Sfs*116; B3502
SAASTLDAL

SEQ ID NO: 21835 - protein, 9 aa, Homo sapiens
  AACR GENIE Results; ARID1A_p.Q507Sfs*116; A0205
SAASTLDAL

SEQ ID NO: 21836 - protein, 10 aa, Homo sapiens
  AACR GENIE Results; ARID1A_p.Q507Sfs*116; C0102
TAPVLSASIL

SEQ ID NO: 21837 - protein, 11 aa, Homo sapiens
  AACR GENIE Results; ARID1A_p.Q507Sfs*116; B3501
LPSTAGAISRF

SEQ ID NO: 21838 - protein, 9 aa, Homo sapiens
  AACR GENIE Results; ARID1A_p.Q507Sfs*116; B5502
TGSVSLPAA

SEQ ID NO: 21839 - protein, 9 aa, Homo sapiens
  AACR GENIE Results; ARID1A_p.Q507Sfs*116; B5801
SSTTTAPVL

SEQ ID NO: 21840 - protein, 9 aa, Homo sapiens
  AACR GENIE Results; ARID1A_p.Q507Sfs*116; B3503
SAVPGSIPL

SEQ ID NO: 21841 - protein, 9 aa, Homo sapiens
  AACR GENIE Results; ARID1A_p.Q507Sfs*116; C0102
TAPVLSASI

SEQ ID NO: 21842 - protein, 9 aa, Homo sapiens
  AACR GENIE Results; ARID1A_p.Q507Sfs*116; B5502
LPAGCVSSA

SEQ ID NO: 21843 - protein, 8 aa, Homo sapiens
  AACR GENIE Results; ARID1A_p.Q507Sfs*116; B3503
TATGSVSL

SEQ ID NO: 21844 - protein, 9 aa, Homo sapiens
  AACR GENIE Results; ARID1A_p.Q507Sfs*116; C0102
ALPSTAGAI

SEQ ID NO: 21845 - protein, 8 aa, Homo sapiens
  AACR GENIE Results; ARID1A_p.Q507Sfs*116; B5502
FPAALPST

SEQ ID NO: 21846 - protein, 8 aa, Homo sapiens
  AACR GENIE Results; ARID1A_p.Q507Sfs*116; B5101
IPASTSAV

SEQ ID NO: 21847 - protein, 9 aa, Homo sapiens
  AACR GENIE Results; ARID1A_p.Q507Sfs*116; B5501
QPQSSTTTA

SEQ ID NO: 21848 - protein, 9 aa, Homo sapiens
  AACR GENIE Results; ARID1A_p.Q507Sfs*116; C0304
SSTTTAPVL

SEQ ID NO: 21849 - protein, 11 aa, Homo sapiens
  AACR GENIE Results; ARID1A_p.Q507Sfs*116; B5502
IPLPAVDDTAA

SEQ ID NO: 21850 - protein, 10 aa, Homo sapiens
  AACR GENIE Results; ARID1A_p.Q507Sfs*116; A6802
TTAPVLSASI

SEQ ID NO: 21851 - protein, 11 aa, Homo sapiens
  AACR GENIE Results; ARID1A_p.Q507Sfs*116; B5502
APVLSASILPA

SEQ ID NO: 21852 - protein, 9 aa, Homo sapiens
  AACR GENIE Results; ARID1A_p.Q507Sfs*116; B3501
FPAALPSTA

SEQ ID NO: 21853 - protein, 9 aa, Homo sapiens
  AACR GENIE Results; ARID1A_p.Q507Sfs*116; B3906
GSVSLPAAA

SEQ ID NO: 21854 - protein, 9 aa, Homo sapiens
  AACR GENIE Results; ARID1A_p.Q507Sfs*116; B3901
SAASTLDAL

SEQ ID NO: 21855 - protein, 11 aa, Homo sapiens
  AACR GENIE Results; ARID1A_p.Q507Sfs*116; A0206
AVPGSIPLPAV

SEQ ID NO: 21856 - protein, 9 aa, Homo sapiens
  AACR GENIE Results; ARID1A_p.Q507Sfs*116; A6802
TTTAPVLSA

SEQ ID NO: 21857 - protein, 11 aa, Homo sapiens
  AACR GENIE Results; ARID1A_p.Q507Sfs*116; B5502
FPAALPSTAGA

SEQ ID NO: 21858 - protein, 9 aa, Homo sapiens
  AACR GENIE Results; ARID1A_p.Q507Sfs*116; B3501
APPEPAPLL

SEQ ID NO: 21859 - protein, 8 aa, Homo sapiens
  AACR GENIE Results; ARID1A_p.Q507Sfs*116; B5502
IPASTSAV

SEQ ID NO: 21860 - protein, 11 aa, Homo sapiens
  AACR GENIE Results; ARID1A_p.Q507Sfs*116; B0702
APVSAVPANCL

SEQ ID NO: 21861 - protein, 9 aa, Homo sapiens
  AACR GENIE Results; ARID1A_p.Q507Sfs*116; A1101
ATGSVSLPA

SEQ ID NO: 21862 - protein, 9 aa, Homo sapiens
  AACR GENIE Results; ARID1A_p.Q507Sfs*116; B3503
SSTTTAPVL

SEQ ID NO: 21863 - protein, 10 aa, Homo sapiens
  AACR GENIE Results; ARID1A_p.Q507Sfs*116; B5502
FPAALPSTAG

SEQ ID NO: 21864 - protein, 10 aa, Homo sapiens
  AACR GENIE Results; ARID1A_p.Q507Sfs*116; B3502
TAAPPEPAPL

SEQ ID NO: 21865 - protein, 9 aa, Homo sapiens
  AACR GENIE Results; ARID1A_p.Q507Sfs*116; B5502
APPEPAPLL

SEQ ID NO: 21866 - protein, 10 aa, Homo sapiens
  AACR GENIE Results; ARID1A_p.Q507Sfs*116; B3503
FPAALPSTAG

SEQ ID NO: 21867 - protein, 8 aa, Homo sapiens
  AACR GENIE Results; ARID1A_p.Q507Sfs*116; B5101
LPSTAGAI

SEQ ID NO: 21868 - protein, 9 aa, Homo sapiens
  AACR GENIE Results; ARID1A_p.Q507Sfs*116; B1302
ALPSTAGAI

SEQ ID NO: 21869 - protein, 8 aa, Homo sapiens
  AACR GENIE Results; ARID1A_p.Q507Sfs*116; B3906
FPAALPST

SEQ ID NO: 21870 - protein, 9 aa, Homo sapiens
  AACR GENIE Results; ARID1A_p.Q507Sfs*116; B5502
APVSAVPAN

SEQ ID NO: 21871 - protein, 9 aa, Homo sapiens
  AACR GENIE Results; ARID1A_p.Q507Sfs*116; B4601
AAIPASTSA

SEQ ID NO: 21872 - protein, 9 aa, Homo sapiens
  AACR GENIE Results; ARID1A_p.Q507Sfs*116; B5101
APPEPAPLL

SEQ ID NO: 21873 - protein, 9 aa, Homo sapiens
  AACR GENIE Results; ARID1A_p.Q507Sfs*116; C0304
SAVPGSIPL

SEQ ID NO: 21874 - protein, 10 aa, Homo sapiens
  AACR GENIE Results; ARID1A_p.Q507Sfs*116; B3501
FPAALPSTAG

SEQ ID NO: 21875 - protein, 9 aa, Homo sapiens
  AACR GENIE Results; ARID1A_p.Q507Sfs*116; B3503
LPAAATSAA

SEQ ID NO: 21876 - protein, 8 aa, Homo sapiens
  AACR GENIE Results; ARID1A_p.Q507Sfs*116; B5502
APVSAVPA

SEQ ID NO: 21877 - protein, 9 aa, Homo sapiens
  AACR GENIE Results; ARID1A_p.Q507Sfs*116; B5501
APVSAVPAN

SEQ ID NO: 21878 - protein, 9 aa, Homo sapiens
  AACR GENIE Results; ARID1A_p.Q507Sfs*116; C1601
SSTTTAPVL

SEQ ID NO: 21879 - protein, 9 aa, Homo sapiens
  AACR GENIE Results; ARID1A_p.Q507Sfs*116; C1502
VSSAPVSAV

SEQ ID NO: 21880 - protein, 11 aa, Homo sapiens
  AACR GENIE Results; ARID1A_p.Q507Sfs*116; B5501
APPEPAPLLTA

SEQ ID NO: 21881 - protein, 9 aa, Homo sapiens
  AACR GENIE Results; ARID1A_p.Q507Sfs*116; C0102
SAPVSAVPA

SEQ ID NO: 21882 - protein, 11 aa, Homo sapiens
  AACR GENIE Results; ARID1A_p.Q507Sfs*116; A6801
DTAAPPEPAPL

SEQ ID NO: 21883 - protein, 10 aa, Homo sapiens
  AACR GENIE Results; ARID1A_p.Q507Sfs*116; B2702
FPAALPSTAG

SEQ ID NO: 21884 - protein, 9 aa, Homo sapiens
  AACR GENIE Results; ARID1A_p.Q507Sfs*116; B3502
AAPPEPAPL

SEQ ID NO: 21885 - protein, 9 aa, Homo sapiens
  AACR GENIE Results; ARID1A_p.Q507Sfs*116; B5001
TTTAPVLSA

SEQ ID NO: 21886 - protein, 9 aa, Homo sapiens
  AACR GENIE Results; ARID1A_p.Q507Sfs*116; B5501
VPGSIPLPA

SEQ ID NO: 21887 - protein, 11 aa, Homo sapiens
  AACR GENIE Results; ARID1A_p.Q507Sfs*116; B3503
LPAAIPASTSA

SEQ ID NO: 21888 - protein, 9 aa, Homo sapiens
  AACR GENIE Results; ARID1A_p.Q507Sfs*116; C0102
AAPPEPAPL

SEQ ID NO: 21889 - protein, 8 aa, Homo sapiens
  AACR GENIE Results; ARID1A_p.Q507Sfs*116; C0304
STTTAPVL

SEQ ID NO: 21890 - protein, 9 aa, Homo sapiens
  AACR GENIE Results; ARID1A_p.Q507Sfs*116; B3501
TAAPPEPAP

SEQ ID NO: 21891 - protein, 9 aa, Homo sapiens
  AACR GENIE Results; ARID1A_p.Q507Sfs*116; B3906
VPGSIPLPA

SEQ ID NO: 21892 - protein, 8 aa, Homo sapiens
  AACR GENIE Results; ARID1A_p.Q507Sfs*116; B3502
TATGSVSL

SEQ ID NO: 21893 - protein, 9 aa, Homo sapiens
  AACR GENIE Results; ARID1A_p.Q507Sfs*116; B5502
TTTAPVLSA

SEQ ID NO: 21894 - protein, 9 aa, Homo sapiens
  AACR GENIE Results; ARID1A_p.Q507Sfs*116; B1501
STAGAISRF

SEQ ID NO: 21895 - protein, 9 aa, Homo sapiens
  AACR GENIE Results; ARID1A_p.Q507Sfs*116; B5801
STAGAISRF

SEQ ID NO: 21896 - protein, 9 aa, Homo sapiens
  AACR GENIE Results; ARID1A_p.Q507Sfs*116; B3501
SAASTLDAL

SEQ ID NO: 21897 - protein, 9 aa, Homo sapiens
  AACR GENIE Results; ARID1A_p.Q507Sfs*116; C0102
SLPAAATSA

SEQ ID NO: 21898 - protein, 9 aa, Homo sapiens
  AACR GENIE Results; ARID1A_p.Q507Sfs*116; A6801
PSTAGAISR

SEQ ID NO: 21899 - protein, 9 aa, Homo sapiens
  AACR GENIE Results; ARID1A_p.Q507Sfs*116; B3501
LPAAATSAA

SEQ ID NO: 21900 - protein, 11 aa, Homo sapiens
  AACR GENIE Results; ARID1A_p.Q507Sfs*116; B5502
SVSLPAAATSA

SEQ ID NO: 21901 - protein, 10 aa, Homo sapiens
  AACR GENIE Results; ARID1A_p.Q507Sfs*116; B5502
APVSAVPANC

SEQ ID NO: 21902 - protein, 9 aa, Homo sapiens
  AACR GENIE Results; ARID1A_p.Q507Sfs*116; B3501
LPAAIPAST

SEQ ID NO: 21903 - protein, 11 aa, Homo sapiens
  AACR GENIE Results; ARID1A_p.Q507Sfs*116; A0201
AVPGSIPLPAV

SEQ ID NO: 21904 - protein, 9 aa, Homo sapiens
  AACR GENIE Results; ARID1A_p.Q507Sfs*116; B3502
SAVPGSIPL

SEQ ID NO: 21905 - protein, 9 aa, Homo sapiens
  AACR GENIE Results; ARID1A_p.Q507Sfs*116; B5001
TGSVSLPAA

SEQ ID NO: 21906 - protein, 9 aa, Homo sapiens
  AACR GENIE Results; ARID1A_p.Q507Sfs*116; B3503
AATSAASTL

SEQ ID NO: 21907 - protein, 9 aa, Homo sapiens
  AACR GENIE Results; ARID1A_p.Q507Sfs*116; C1203
GAISRFIWV

SEQ ID NO: 21908 - protein, 9 aa, Homo sapiens
  AACR GENIE Results; ARID1A_p.Q507Sfs*116; B5101
FPAALPSTA

SEQ ID NO: 21909 - protein, 8 aa, Homo sapiens
  AACR GENIE Results; ARID1A_p.Q507Sfs*116; B3906
DALPAGCV

SEQ ID NO: 21910 - protein, 9 aa, Homo sapiens
  AACR GENIE Results; ARID1A_p.Q507Sfs*116; B1302
VSSAPVSAV

SEQ ID NO: 21911 - protein, 9 aa, Homo sapiens
  AACR GENIE Results; ARID1A_p.Q507Sfs*116; A0206
SAASTLDAL

SEQ ID NO: 21912 - protein, 8 aa, Homo sapiens
  AACR GENIE Results; ARID1A_p.Q507Sfs*116; C0303
STTTAPVL

SEQ ID NO: 21913 - protein, 10 aa, Homo sapiens
  AACR GENIE Results; ARID1A_p.Q507Sfs*116; B5502
IPLPAVDDTA

SEQ ID NO: 21914 - protein, 11 aa, Homo sapiens
  AACR GENIE Results; ARID1A_p.Q507Sfs*116; A6802
TAAPPEPAPLL

SEQ ID NO: 21915 - protein, 11 aa, Homo sapiens
  AACR GENIE Results; ARID1A_p.Q507Sfs*116; A6802
TTAPVLSASIL

SEQ ID NO: 21916 - protein, 8 aa, Homo sapiens
  AACR GENIE Results; ARID1A_p.Q507Sfs*116; B3906
SASILPAA

SEQ ID NO: 21917 - protein, 8 aa, Homo sapiens
  AACR GENIE Results; ARID1A_p.Q507Sfs*116; B5801
STTTAPVL

SEQ ID NO: 21918 - protein, 11 aa, Homo sapiens
  AACR GENIE Results; ARID1A_p.Q507Sfs*116; C1701
TAAPPEPAPLL

SEQ ID NO: 21919 - protein, 8 aa, Homo sapiens
  AACR GENIE Results; ARID1A_p.Q507Sfs*116; B3906
EPAPLLTA

SEQ ID NO: 21920 - protein, 9 aa, Homo sapiens
  AACR GENIE Results; ARID1A_p.Q507Sfs*116; A3001
TTTAPVLSA

SEQ ID NO: 21921 - protein, 9 aa, Homo sapiens
  AACR GENIE Results; ARID1A_p.Q507Sfs*116; B1501
AAIPASTSA

SEQ ID NO: 21922 - protein, 9 aa, Homo sapiens
  AACR GENIE Results; ARID1A_p.Q507Sfs*116; B5501
APPEPAPLL

SEQ ID NO: 21923 - protein, 9 aa, Homo sapiens
  AACR GENIE Results; ARID1A_p.Q507Sfs*116; A0206
GSVSLPAAA

SEQ ID NO: 21924 - protein, 11 aa, Homo sapiens
  AACR GENIE Results; ARID1A_p.Q507Sfs*116; B3906
LPAAIPASTSA

SEQ ID NO: 21925 - protein, 9 aa, Homo sapiens
  AACR GENIE Results; ARID1A_p.Q507Sfs*116; C0304
AAIPASTSA

SEQ ID NO: 21926 - protein, 8 aa, Homo sapiens
  AACR GENIE Results; ARID1A_p.Q507Sfs*116; B3906
GSVSLPAA

SEQ ID NO: 21927 - protein, 11 aa, Homo sapiens
  AACR GENIE Results; ARID1A_p.Q507Sfs*116; B3501
TAAPPEPAPLL

SEQ ID NO: 21928 - protein, 11 aa, Homo sapiens
  AACR GENIE Results; ARID1A_p.Q507Sfs*116; B5501
LPAAIPASTSA

SEQ ID NO: 21929 - protein, 8 aa, Homo sapiens
  AACR GENIE Results; ARID1A_p.Q507Sfs*116; B4002
STTTAPVL

SEQ ID NO: 21930 - protein, 9 aa, Homo sapiens
  AACR GENIE Results; ARID1A_p.Q507Sfs*116; A3303
TTTAPVLSA

SEQ ID NO: 21931 - protein, 9 aa, Homo sapiens
  AACR GENIE Results; ARID1A_p.Q507Sfs*116; B3503
LPAAIPAST

SEQ ID NO: 21932 - protein, 9 aa, Homo sapiens
  AACR GENIE Results; ARID1A_p.Q507Sfs*116; C1701
SAVPGSIPL

SEQ ID NO: 21933 - protein, 9 aa, Homo sapiens
  AACR GENIE Results; ARID1A_p.Q507Sfs*116; C0202
STAGAISRF

SEQ ID NO: 21934 - protein, 9 aa, Homo sapiens
  AACR GENIE Results; ARID1A_p.Q507Sfs*116; C1502
GAISRFIWV

SEQ ID NO: 21935 - protein, 9 aa, Homo sapiens
  AACR GENIE Results; ARID1A_p.Q507Sfs*116; C0801
AATSAASTL

SEQ ID NO: 21936 - protein, 10 aa, Homo sapiens
  AACR GENIE Results; ARID1A_p.Q507Sfs*116; B5502
LPAAIPASTS

SEQ ID NO: 21937 - protein, 9 aa, Homo sapiens
  AACR GENIE Results; ARID1A_p.Q507Sfs*116; B3906
TTTAPVLSA

SEQ ID NO: 21938 - protein, 9 aa, Homo sapiens
  AACR GENIE Results; ARID1A_p.Q507Sfs*116; C0801
VSSAPVSAV

SEQ ID NO: 21939 - protein, 9 aa, Homo sapiens
  AACR GENIE Results; ARID1A_p.Q507Sfs*116; B5501
TGSVSLPAA

SEQ ID NO: 21940 - protein, 9 aa, Homo sapiens
  AACR GENIE Results; ARID1A_p.Q507Sfs*116; B5801
VSSAPVSAV

SEQ ID NO: 21941 - protein, 9 aa, Homo sapiens
  AACR GENIE Results; ARID1A_p.Q507Sfs*116; A6802
VSSAPVSAV

SEQ ID NO: 21942 - protein, 9 aa, Homo sapiens
  AACR GENIE Results; ARID1A_p.Q507Sfs*116; A6801
STAGAISRF

SEQ ID NO: 21943 - protein, 10 aa, Homo sapiens
  AACR GENIE Results; ARID1A_p.Q507Sfs*116; A6802
STLDALPAGC

SEQ ID NO: 21944 - protein, 11 aa, Homo sapiens
  AACR GENIE Results; ARID1A_p.Q507Sfs*116; C0304
TAAPPEPAPLL

SEQ ID NO: 21945 - protein, 9 aa, Homo sapiens
  AACR GENIE Results; ARID1A_p.Q507Sfs*116; B3801
APPEPAPLL

SEQ ID NO: 21946 - protein, 8 aa, Homo sapiens
  AACR GENIE Results; ARID1A_p.Q507Sfs*116; B5501
FPAALPST

SEQ ID NO: 21947 - protein, 9 aa, Homo sapiens
  AACR GENIE Results; ARID1A_p.Q507Sfs*116; B5501
LPAGCVSSA

SEQ ID NO: 21948 - protein, 9 aa, Homo sapiens
  AACR GENIE Results; ARID1A_p.Q507Sfs*116; B3906
LPAAATSAA

SEQ ID NO: 21949 - protein, 8 aa, Homo sapiens
  AACR GENIE Results; ARID1A_p.Q507Sfs*116; B3503
PPEPAPLL

SEQ ID NO: 21950 - protein, 9 aa, Homo sapiens
  AACR GENIE Results; ARID1A_p.Q507Sfs*116; B5801
TTTAPVLSA

SEQ ID NO: 21951 - protein, 9 aa, Homo sapiens
  AACR GENIE Results; ARID1A_p.Q507Sfs*116; B5801
SAVPANCLF

SEQ ID NO: 21952 - protein, 11 aa, Homo sapiens
  AACR GENIE Results; ARID1A_p.Q507Sfs*116; A6802
STLDALPAGCV

SEQ ID NO: 21953 - protein, 9 aa, Homo sapiens
  AACR GENIE Results; ARID1A_p.Q507Sfs*116; C0304
SAASTLDAL

SEQ ID NO: 21954 - protein, 9 aa, Homo sapiens
  AACR GENIE Results; ARID1A_p.Q507Sfs*116; A0205
TGSVSLPAA

SEQ ID NO: 21955 - protein, 9 aa, Homo sapiens
  AACR GENIE Results; ARID1A_p.Q507Sfs*116; B5001
GSVSLPAAA

SEQ ID NO: 21956 - protein, 11 aa, Homo sapiens
  AACR GENIE Results; ARID1A_p.Q507Sfs*116; B3501
LPAAIPASTSA

SEQ ID NO: 21957 - protein, 9 aa, Homo sapiens
  AACR GENIE Results; ARID1A_p.Q507Sfs*116; C0801
SSTTTAPVL

SEQ ID NO: 21958 - protein, 10 aa, Homo sapiens
  AACR GENIE Results; ARID1A_p.Q507Sfs*116; B3901
TAAPPEPAPL

SEQ ID NO: 21959 - protein, 10 aa, Homo sapiens
  AACR GENIE Results; ARID1A_p.Q507Sfs*116; C0304
TAAPPEPAPL

SEQ ID NO: 21960 - protein, 9 aa, Homo sapiens
  AACR GENIE Results; ARID1A_p.Q507Sfs*116; B5001
PEPAPLLTA

SEQ ID NO: 21961 - protein, 10 aa, Homo sapiens
  AACR GENIE Results; ARID1A_p.Q507Sfs*116; A6802
TAAPPEPAPL

SEQ ID NO: 21962 - protein, 9 aa, Homo sapiens
  AACR GENIE Results; ARID1A_p.Q507Sfs*116; A0205
STAGAISRF

SEQ ID NO: 21963 - protein, 9 aa, Homo sapiens
  AACR GENIE Results; ARID1A_p.Q507Sfs*116; A6801
TTTAPVLSA

SEQ ID NO: 21964 - protein, 9 aa, Homo sapiens
  AACR GENIE Results; ARID1A_p.Q507Sfs*116; A0206
STLDALPAG

SEQ ID NO: 21965 - protein, 8 aa, Homo sapiens
  AACR GENIE Results; ARID1A_p.Q507Sfs*116; B5501
LPAAATSA

SEQ ID NO: 21966 - protein, 9 aa, Homo sapiens
  AACR GENIE Results; ARID1A_p.Q507Sfs*116; B5502
APVLSASIL

SEQ ID NO: 21967 - protein, 9 aa, Homo sapiens
  AACR GENIE Results; ARID1A_p.Q507Sfs*116; B4601
VSSAPVSAV

SEQ ID NO: 21968 - protein, 11 aa, Homo sapiens
  AACR GENIE Results; ARID1A_p.Q507Sfs*116; B3503
IPLPAVDDTAA

SEQ ID NO: 21969 - protein, 9 aa, Homo sapiens
  AACR GENIE Results; ARID1A_p.Q507Sfs*116; C1502
SSTTTAPVL

SEQ ID NO: 21970 - protein, 9 aa, Homo sapiens
  AACR GENIE Results; ARID1A_p.Q507Sfs*116; A3001
APPEPAPLL

SEQ ID NO: 21971 - protein, 9 aa, Homo sapiens
  AACR GENIE Results; ARID1A_p.Q507Sfs*116; C0303
SAASTLDAL

SEQ ID NO: 21972 - protein, 9 aa, Homo sapiens
  AACR GENIE Results; ARID1A_p.Q507Sfs*116; A3001
VSSAPVSAV

SEQ ID NO: 21973 - protein, 9 aa, Homo sapiens
  AACR GENIE Results; ARID1A_p.Q507Sfs*116; B3906
LPAAIPAST

SEQ ID NO: 21974 - protein, 9 aa, Homo sapiens
  AACR GENIE Results; ARID1A_p.Q507Sfs*116; A0205
AAIPASTSA

SEQ ID NO: 21975 - protein, 8 aa, Homo sapiens
  AACR GENIE Results; ARID1A_p.Q507Sfs*116; B5501
IPASTSAV

SEQ ID NO: 21976 - protein, 9 aa, Homo sapiens
  AACR GENIE Results; ARID1A_p.Q507Sfs*116; A0205
LTATGSVSL

SEQ ID NO: 21977 - protein, 9 aa, Homo sapiens
  AACR GENIE Results; ARID1A_p.Q507Sfs*116; B0702
LPAAATSAA

SEQ ID NO: 21978 - protein, 9 aa, Homo sapiens
  AACR GENIE Results; ARID1A_p.Q507Sfs*116; A1101
STAGAISRF

SEQ ID NO: 21979 - protein, 11 aa, Homo sapiens
  AACR GENIE Results; ARID1A_p.Q507Sfs*116; A6802
DTAAPPEPAPL

SEQ ID NO: 21980 - protein, 10 aa, Homo sapiens
  AACR GENIE Results; ARID1A_p.Q507Sfs*116; B3503
IPLPAVDDTA

SEQ ID NO: 21981 - protein, 8 aa, Homo sapiens
  AACR GENIE Results; ARID1A_p.Q507Sfs*116; C1601
STTTAPVL

SEQ ID NO: 21982 - protein, 10 aa, Homo sapiens
  AACR GENIE Results; ARID1A_p.Q507Sfs*116; A6802
STAGAISRFI

SEQ ID NO: 21983 - protein, 9 aa, Homo sapiens
  AACR GENIE Results; ARID1A_p.Q507Sfs*116; A0206
SSTTTAPVL

SEQ ID NO: 21984 - protein, 9 aa, Homo sapiens
  AACR GENIE Results; ARID1A_p.Q507Sfs*116; C0801
SAVPGSIPL

SEQ ID NO: 21985 - protein, 9 aa, Homo sapiens
  AACR GENIE Results; ARID1A_p.Q507Sfs*116; C0303
SAVPGSIPL

SEQ ID NO: 21986 - protein, 9 aa, Homo sapiens
  AACR GENIE Results; ARID1A_p.Q507Sfs*116; A6802
WVSGILSPL

SEQ ID NO: 21987 - protein, 9 aa, Homo sapiens
  AACR GENIE Results; ARID1A_p.Q507Sfs*116; B5801
VSAVPANCL

SEQ ID NO: 21988 - protein, 9 aa, Homo sapiens
  AACR GENIE Results; ARID1A_p.Q507Sfs*116; B5501
TTTAPVLSA

SEQ ID NO: 21989 - protein, 9 aa, Homo sapiens
  AACR GENIE Results; ARID1A_p.Q507Sfs*116; B1501
AATSAASTL

SEQ ID NO: 21990 - protein, 10 aa, Homo sapiens
  AACR GENIE Results; ARID1A_p.Q507Sfs*116; B3501
LPSTAGAISR

SEQ ID NO: 21991 - protein, 8 aa, Homo sapiens
  AACR GENIE Results; ARID1A_p.Q507Sfs*116; B3503
STTTAPVL

SEQ ID NO: 21992 - protein, 9 aa, Homo sapiens
  AACR GENIE Results; ARID1A_p.Q507Sfs*116; A0301
ATGSVSLPA

SEQ ID NO: 21993 - protein, 9 aa, Homo sapiens
  AACR GENIE Results; ARID1A_p.Q507Sfs*116; A0206
AVPGSIPLP

SEQ ID NO: 21994 - protein, 9 aa, Homo sapiens
  AACR GENIE Results; ARID1A_p.Q507Sfs*116; B5701
STAGAISRF

SEQ ID NO: 21995 - protein, 11 aa, Homo sapiens
  AACR GENIE Results; ARID1A_p.Q507Sfs*116; B3801
TAAPPEPAPLL

SEQ ID NO: 21996 - protein, 8 aa, Homo sapiens
  AACR GENIE Results; ARID1A_p.Q507Sfs*116; B3901
DALPAGCV

SEQ ID NO: 21997 - protein, 10 aa, Homo sapiens
  AACR GENIE Results; ARID1A_p.Q507Sfs*116; B3501
TAAPPEPAPL

SEQ ID NO: 21998 - protein, 10 aa, Homo sapiens
  AACR GENIE Results; ARID1A_p.Q507Sfs*116; A1101
ATGSVSLPAA

SEQ ID NO: 21999 - protein, 11 aa, Homo sapiens
  AACR GENIE Results; ARID1A_p.Q507Sfs*116; A6801
TTAPVLSASIL

SEQ ID NO: 22000 - protein, 9 aa, Homo sapiens
  AACR GENIE Results; ARID1A_p.Q507Sfs*116; C0602
SRFIWVSGI

SEQ ID NO: 22001 - protein, 9 aa, Homo sapiens
  AACR GENIE Results; ARID1A_p.Q507Sfs*116; A0201
ILPAAIPAS

SEQ ID NO: 22002 - protein, 8 aa, Homo sapiens
  AACR GENIE Results; ARID1A_p.Q507Sfs*116; B5801
TAGAISRF

SEQ ID NO: 22003 - protein, 10 aa, Homo sapiens
  AACR GENIE Results; ARID1A_p.Q507Sfs*116; A0206
STLDALPAGC

SEQ ID NO: 22004 - protein, 8 aa, Homo sapiens
  AACR GENIE Results; ARID1A_p.Q507Sfs*116; B5501
EPAPLLTA

SEQ ID NO: 22005 - protein, 9 aa, Homo sapiens
  AACR GENIE Results; ARID1A_p.Q507Sfs*116; A6802
SASILPAAI

SEQ ID NO: 22006 - protein, 8 aa, Homo sapiens
  AACR GENIE Results; ARID1A_p.Q507Sfs*116; B3501
TATGSVSL

SEQ ID NO: 22007 - protein, 9 aa, Homo sapiens
  AACR GENIE Results; ARID1A_p.Q507Sfs*116; B5502
IPASTSAVP

SEQ ID NO: 22008 - protein, 9 aa, Homo sapiens
  AACR GENIE Results; ARID1A_p.Q507Sfs*116; A6802
FPAALPSTA

SEQ ID NO: 22009 - protein, 10 aa, Homo sapiens
  AACR GENIE Results; ARID1A_p.Q507Sfs*116; A0201
ALPAGCVSSA

SEQ ID NO: 22010 - protein, 9 aa, Homo sapiens
  AACR GENIE Results; ARID1A_p.Q507Sfs*116; C0302
VSSAPVSAV

SEQ ID NO: 22011 - protein, 8 aa, Homo sapiens
  AACR GENIE Results; ARID1A_p.Q507Sfs*116; C0801
AASTLDAL

SEQ ID NO: 22012 - protein, 8 aa, Homo sapiens
  AACR GENIE Results; ARID1A_p.Q507Sfs*116; B5501
APVSAVPA

SEQ ID NO: 22013 - protein, 8 aa, Homo sapiens
  AACR GENIE Results; ARID1A_p.Q507Sfs*116; B3906
LPAAATSA

SEQ ID NO: 22014 - protein, 8 aa, Homo sapiens
  AACR GENIE Results; ARID1A_p.Q507Sfs*116; B0801
DALPAGCV

SEQ ID NO: 22015 - protein, 9 aa, Homo sapiens
  AACR GENIE Results; ARID1A_p.Q507Sfs*116; A6802
STSAVPGSI

SEQ ID NO: 22016 - protein, 11 aa, Homo sapiens
  AACR GENIE Results; ARID1A_p.Q507Sfs*116; B3503
APVSAVPANCL

SEQ ID NO: 22017 - protein, 8 aa, Homo sapiens
  AACR GENIE Results; ARID1A_p.Q507Sfs*116; B3501
FPAALPST

SEQ ID NO: 22018 - protein, 9 aa, Homo sapiens
  AACR GENIE Results; ARID1A_p.Q507Sfs*116; A0206
TGSVSLPAA

SEQ ID NO: 22019 - protein, 9 aa, Homo sapiens
  AACR GENIE Results; ARID1A_p.Q507Sfs*116; B3501
SAVPANCLF

SEQ ID NO: 22020 - protein, 9 aa, Homo sapiens
  AACR GENIE Results; ARID1A_p.Q507Sfs*116; B3503
AAPPEPAPL

SEQ ID NO: 22021 - protein, 9 aa, Homo sapiens
  AACR GENIE Results; ARID1A_p.Q507Sfs*116; A0205
TTTAPVLSA

SEQ ID NO: 22022 - protein, 11 aa, Homo sapiens
  AACR GENIE Results; ARID1A_p.Q507Sfs*116; A1101
SVSLPAAATSA

SEQ ID NO: 22023 - protein, 10 aa, Homo sapiens
  AACR GENIE Results; ARID1A_p.Q507Sfs*116; A1101
STLDALPAGC

SEQ ID NO: 22024 - protein, 9 aa, Homo sapiens
  AACR GENIE Results; ARID1A_p.Q507Sfs*116; B3502
FPAALPSTA

SEQ ID NO: 22025 - protein, 10 aa, Homo sapiens
  AACR GENIE Results; ARID1A_p.Q507Sfs*116; B5501
VPGSIPLPAV

SEQ ID NO: 22026 - protein, 8 aa, Homo sapiens
  AACR GENIE Results; ARID1A_p.Q507Sfs*116; B3503
LPSTAGAI

SEQ ID NO: 22027 - protein, 9 aa, Homo sapiens
  AACR GENIE Results; ARID1A_p.Q507Sfs*116; B3901
TAAPPEPAP

SEQ ID NO: 22028 - protein, 9 aa, Homo sapiens
  AACR GENIE Results; ARID1A_p.Q507Sfs*116; B0702
SAASTLDAL

SEQ ID NO: 22029 - protein, 9 aa, Homo sapiens
  AACR GENIE Results; ARID1A_p.Q507Sfs*116; B5001
ATGSVSLPA

SEQ ID NO: 22030 - protein, 9 aa, Homo sapiens
  AACR GENIE Results; ARID1A_p.Q507Sfs*116; A0201
SILPAAIPA

SEQ ID NO: 22031 - protein, 9 aa, Homo sapiens
  AACR GENIE Results; ARID1A_p.Q507Sfs*116; B4601
SAASTLDAL

SEQ ID NO: 22032 - protein, 9 aa, Homo sapiens
  AACR GENIE Results; ARID1A_p.Q507Sfs*116; B5801
AATSAASTL

SEQ ID NO: 22033 - protein, 9 aa, Homo sapiens
  AACR GENIE Results; ARID1A_p.Q507Sfs*116; C0801
AAIPASTSA

SEQ ID NO: 22034 - protein, 8 aa, Homo sapiens
  AACR GENIE Results; ARID1A_p.Q507Sfs*116; B3906
APVSAVPA

SEQ ID NO: 22035 - protein, 10 aa, Homo sapiens
  AACR GENIE Results; ARID1A_p.Q507Sfs*116; C1701
AAPPEPAPLL

SEQ ID NO: 22036 - protein, 11 aa, Homo sapiens
  AACR GENIE Results; ARID1A_p.Q507Sfs*116; B5502
TATGSVSLPAA

SEQ ID NO: 22037 - protein, 9 aa, Homo sapiens
  AACR GENIE Results; ARID1A_p.Q507Sfs*116; A0206
FPAALPSTA

SEQ ID NO: 22038 - protein, 10 aa, Homo sapiens
  AACR GENIE Results; ARID1A_p.Q507Sfs*116; A3303
LPSTAGAISR

SEQ ID NO: 22039 - protein, 9 aa, Homo sapiens
  AACR GENIE Results; ARID1A_p.Q507Sfs*116; C0303
AAIPASTSA

SEQ ID NO: 22040 - protein, 9 aa, Homo sapiens
  AACR GENIE Results; ARID1A_p.Q507Sfs*116; B1302
SASILPAAI

SEQ ID NO: 22041 - protein, 10 aa, Homo sapiens
  AACR GENIE Results; ARID1A_p.Q507Sfs*116; A3001
AVPGSIPLPA

SEQ ID NO: 22042 - protein, 9 aa, Homo sapiens
  AACR GENIE Results; ARID1A_p.Q507Sfs*116; B0702
AATSAASTL

SEQ ID NO: 22043 - protein, 10 aa, Homo sapiens
  AACR GENIE Results; ARID1A_p.Q507Sfs*116; B5502
IPASTSAVPG

SEQ ID NO: 22044 - protein, 11 aa, Homo sapiens
  AACR GENIE Results; ARID1A_p.Q507Sfs*116; B3906
APPEPAPLLTA

SEQ ID NO: 22045 - protein, 8 aa, Homo sapiens
  AACR GENIE Results; ARID1A_p.Q507Sfs*116; B0702
APVLSASI

SEQ ID NO: 22046 - protein, 10 aa, Homo sapiens
  AACR GENIE Results; ARID1A_p.Q507Sfs*116; B5001
ALPAGCVSSA

SEQ ID NO: 22047 - protein, 9 aa, Homo sapiens
  AACR GENIE Results; ARID1A_p.Q507Sfs*116; C1203
VSSAPVSAV

SEQ ID NO: 22048 - protein, 9 aa, Homo sapiens
  AACR GENIE Results; ARID1A_p.Q507Sfs*116; A6802
DTAAPPEPA

SEQ ID NO: 22049 - protein, 10 aa, Homo sapiens
  AACR GENIE Results; ARID1A_p.Q507Sfs*116; A0201
STLDALPAGC

SEQ ID NO: 22050 - protein, 11 aa, Homo sapiens
  AACR GENIE Results; ARID1A_p.Q507Sfs*116; A0301
ALPSTAGAISR

SEQ ID NO: 22051 - protein, 10 aa, Homo sapiens
  AACR GENIE Results; ARID1A_p.Q507Sfs*116; A1101
AVPGSIPLPA

SEQ ID NO: 22052 - protein, 9 aa, Homo sapiens
  AACR GENIE Results; ARID1A_p.Q507Sfs*116; A6802
STAGAISRF

SEQ ID NO: 22053 - protein, 9 aa, Homo sapiens
  AACR GENIE Results; ARID1A_p.Q507Sfs*116; A0205
AIPASTSAV

SEQ ID NO: 22054 - protein, 9 aa, Homo sapiens
  AACR GENIE Results; ARID1A_p.Q507Sfs*116; A0206
VSSAPVSAV

SEQ ID NO: 22055 - protein, 11 aa, Homo sapiens
  AACR GENIE Results; ARID1A_p.Q507Sfs*116; C0801
ATSAASTLDAL

SEQ ID NO: 22056 - protein, 8 aa, Homo sapiens
  AACR GENIE Results; ARID1A_p.Q507Sfs*116; B3906
TTAPVLSA

SEQ ID NO: 22057 - protein, 9 aa, Homo sapiens
  AACR GENIE Results; ARID1A_p.Q507Sfs*116; C0102
SAASTLDAL

SEQ ID NO: 22058 - protein, 10 aa, Homo sapiens
  AACR GENIE Results; ARID1A_p.Q507Sfs*116; A0201
ILPAAIPAST

SEQ ID NO: 22059 - protein, 9 aa, Homo sapiens
  AACR GENIE Results; ARID1A_p.Q507Sfs*116; A0201
VSSAPVSAV

SEQ ID NO: 22060 - protein, 10 aa, Homo sapiens
  AACR GENIE Results; ARID1A_p.Q507Sfs*116; A6801
IPASTSAVPG

SEQ ID NO: 22061 - protein, 8 aa, Homo sapiens
  AACR GENIE Results; ARID1A_p.Q507Sfs*116; B5101
LPAAATSA

SEQ ID NO: 22062 - protein, 9 aa, Homo sapiens
  AACR GENIE Results; ARID1A_p.Q507Sfs*116; A0205
VSSAPVSAV

SEQ ID NO: 22063 - protein, 8 aa, Homo sapiens
  AACR GENIE Results; ARID1A_p.Q507Sfs*116; B1401
DALPAGCV

SEQ ID NO: 22064 - protein, 9 aa, Homo sapiens
  AACR GENIE Results; ARID1A_p.Q507Sfs*116; C0801
TAAPPEPAP

SEQ ID NO: 22065 - protein, 9 aa, Homo sapiens
  AACR GENIE Results; ARID1A_p.Q507Sfs*116; B5701
AGAISRFIW

SEQ ID NO: 22066 - protein, 9 aa, Homo sapiens
  AACR GENIE Results; ARID1A_p.Q507Sfs*116; C0304
LTATGSVSL

SEQ ID NO: 22067 - protein, 9 aa, Homo sapiens
  AACR GENIE Results; ARID1A_p.Q507Sfs*116; C0304
VSAVPANCL

SEQ ID NO: 22068 - protein, 9 aa, Homo sapiens
  AACR GENIE Results; ARID1A_p.Q507Sfs*116; B3501
APVLSASIL

SEQ ID NO: 22069 - protein, 9 aa, Homo sapiens
  AACR GENIE Results; ARID1A_p.Q507Sfs*116; B5001
AAIPASTSA

SEQ ID NO: 22070 - protein, 10 aa, Homo sapiens
  AACR GENIE Results; ARID1A_p.Q507Sfs*116; A6802
SSAPVSAVPA

SEQ ID NO: 22071 - protein, 9 aa, Homo sapiens
  AACR GENIE Results; ARID1A_p.Q507Sfs*116; B5101
LPAAATSAA

SEQ ID NO: 22072 - protein, 9 aa, Homo sapiens
  AACR GENIE Results; ARID1A_p.Q507Sfs*116; B3501
SAVPGSIPL

SEQ ID NO: 22073 - protein, 11 aa, Homo sapiens
  AACR GENIE Results; ARID1A_p.Q507Sfs*116; A0205
AVPGSIPLPAV

SEQ ID NO: 22074 - protein, 9 aa, Homo sapiens
  AACR GENIE Results; ARID1A_p.Q507Sfs*116; B5101
LPAAIPAST

SEQ ID NO: 22075 - protein, 9 aa, Homo sapiens
  AACR GENIE Results; ARID1A_p.Q507Sfs*116; B5001
CVSSAPVSA

SEQ ID NO: 22076 - protein, 9 aa, Homo sapiens
  AACR GENIE Results; ARID1A_p.Q507Sfs*116; B3901
APPEPAPLL

SEQ ID NO: 22077 - protein, 8 aa, Homo sapiens
  AACR GENIE Results; ARID1A_p.Q507Sfs*116; B3503
LPAAATSA

SEQ ID NO: 22078 - protein, 9 aa, Homo sapiens
  AACR GENIE Results; ARID1A_p.Q507Sfs*116; A0201
VLSASILPA

SEQ ID NO: 22079 - protein, 8 aa, Homo sapiens
  AACR GENIE Results; ARID1A_p.Q507Sfs*116; B5701
GAISRFIW

SEQ ID NO: 22080 - protein, 8 aa, Homo sapiens
  AACR GENIE Results; ARID1A_p.Q507Sfs*116; B0702
STTTAPVL

SEQ ID NO: 22081 - protein, 10 aa, Homo sapiens
  AACR GENIE Results; ARID1A_p.Q507Sfs*116; B0702
APLLTATGSV

SEQ ID NO: 22082 - protein, 9 aa, Homo sapiens
  AACR GENIE Results; ARID1A_p.Q507Sfs*116; B5801
LTATGSVSL

SEQ ID NO: 22083 - protein, 10 aa, Homo sapiens
  AACR GENIE Results; ARID1A_p.R2158Q; A0201
FLSDQKNPVC

SEQ ID NO: 22084 - protein, 9 aa, Homo sapiens
  AACR GENIE Results; ARID1A_p.R2158Q; A0201
FLSDQKNPV

SEQ ID NO: 22085 - protein, 9 aa, Homo sapiens
  AACR GENIE Results; ARID1A_p.S733L; B0702
PPRPPSGQL

SEQ ID NO: 22086 - protein, 10 aa, Homo sapiens
  AACR GENIE Results; ARID1A_p.S733L; B0702
MPPRPPSGQL

SEQ ID NO: 22087 - protein, 10 aa, Homo sapiens
  AACR GENIE Results; ARID1B_p.A350dup; B2702
QRFAGQTDQH

SEQ ID NO: 22088 - protein, 11 aa, Homo sapiens
  AACR GENIE Results; ARID2_p.R572T; A6801
TTVFPNHTVKR

SEQ ID NO: 22089 - protein, 10 aa, Homo sapiens
  AACR GENIE Results; ARID2_p.R572T; A1101
TTVFPNHTVK

SEQ ID NO: 22090 - protein, 10 aa, Homo sapiens
  AACR GENIE Results; ARID2_p.R572T; A6801
TTVFPNHTVK

SEQ ID NO: 22091 - protein, 9 aa, Homo sapiens
  AACR GENIE Results; ARID2_p.R572T; C1502
TTVFPNHTV

SEQ ID NO: 22092 - protein, 9 aa, Homo sapiens
  AACR GENIE Results; ARID2_p.R572T; A6801
TTVFPNHTV

SEQ ID NO: 22093 - protein, 9 aa, Homo sapiens
  AACR GENIE Results; ARID2_p.R572T; B1302
TTVFPNHTV

SEQ ID NO: 22094 - protein, 11 aa, Homo sapiens
  AACR GENIE Results; ARID2_p.R572T; A3101
TTVFPNHTVKR

SEQ ID NO: 22095 - protein, 9 aa, Homo sapiens
  AACR GENIE Results; ARID2_p.R572T; A2402
FYKCLTTVF

SEQ ID NO: 22096 - protein, 9 aa, Homo sapiens
  AACR GENIE Results; ARID2_p.R572T; A2301
FYKCLTTVF

SEQ ID NO: 22097 - protein, 9 aa, Homo sapiens
  AACR GENIE Results; ARID2_p.R572T; A0201
TTVFPNHTV

SEQ ID NO: 22098 - protein, 10 aa, Homo sapiens
  AACR GENIE Results; ARID2_p.R572T; A0301
TTVFPNHTVK

SEQ ID NO: 22099 - protein, 10 aa, Homo sapiens
  AACR GENIE Results; ARID2_p.S759Y; B3501
GPQPVTVVNY

SEQ ID NO: 22100 - protein, 8 aa, Homo sapiens
  AACR GENIE Results; ARID2_p.S759Y; B3501
QPVTVVNY

SEQ ID NO: 22101 - protein, 9 aa, Homo sapiens
  AACR GENIE Results; ARID2_p.S759Y; B1501
PQPVTVVNY

SEQ ID NO: 22102 - protein, 9 aa, Homo sapiens
  AACR GENIE Results; ARID2_p.S759Y; A0301
VVNYQTLLH

SEQ ID NO: 22103 - protein, 8 aa, Homo sapiens
  AACR GENIE Results; ARID5B_p.R34I; B4001
LEGKPIIL

SEQ ID NO: 22104 - protein, 9 aa, Homo sapiens
  AACR GENIE Results; ARID5B_p.R34I; A3001
EGKPIILSL

SEQ ID NO: 22105 - protein, 9 aa, Homo sapiens
  AACR GENIE Results; ARID5B_p.R34I; C0501
HLEGKPIIL

SEQ ID NO: 22106 - protein, 9 aa, Homo sapiens
  AACR GENIE Results; ARID5B_p.R34I; B0801
EGKPIILSL

SEQ ID NO: 22107 - protein, 10 aa, Homo sapiens
  AACR GENIE Results; ASXL1_p.G646Wfs*12; B5801
ATTAIGGGGW

SEQ ID NO: 22108 - protein, 9 aa, Homo sapiens
  AACR GENIE Results; ASXL1_p.G646Wfs*12; B5801
TTAIGGGGW

SEQ ID NO: 22109 - protein, 9 aa, Homo sapiens
  AACR GENIE Results; ASXL1_p.G646Wfs*12; C0801
TTAIGGGGW

SEQ ID NO: 22110 - protein, 9 aa, Homo sapiens
  AACR GENIE Results; ASXL1_p.G646Wfs*12; B5701
TTAIGGGGW

SEQ ID NO: 22111 - protein, 11 aa, Homo sapiens
  AACR GENIE Results; ASXL1_p.G646Wfs*12; B5801
AATTAIGGGGW

SEQ ID NO: 22112 - protein, 9 aa, Homo sapiens
  AACR GENIE Results; ASXL1_p.G646Wfs*12; A6801
TTAIGGGGW

SEQ ID NO: 22113 - protein, 10 aa, Homo sapiens
  AACR GENIE Results; ASXL1_p.P873L; B1801
DELGLGGSCL

SEQ ID NO: 22114 - protein, 10 aa, Homo sapiens
  AACR GENIE Results; ASXL1_p.S1028L; B4001
REAAVTKGSL

SEQ ID NO: 22115 - protein, 10 aa, Homo sapiens
  AACR GENIE Results; ASXL1_p.S1028L; A1101
AVTKGSLVDK

SEQ ID NO: 22116 - protein, 9 aa, Homo sapiens
  AACR GENIE Results; ASXL1_p.S1028L; A1101
VTKGSLVDK

SEQ ID NO: 22117 - protein, 10 aa, Homo sapiens
  AACR GENIE Results; ASXL1_p.S1028L; A0301
AVTKGSLVDK

SEQ ID NO: 22118 - protein, 9 aa, Homo sapiens
  AACR GENIE Results; ASXL1_p.S1028L; A0301
VTKGSLVDK

SEQ ID NO: 22119 - protein, 9 aa, Homo sapiens
  AACR GENIE Results; ASXL1_p.S1028L; A3101
VTKGSLVDK

SEQ ID NO: 22120 - protein, 11 aa, Homo sapiens
  AACR GENIE Results; ASXL1_p.S1028L; A1101
AAVTKGSLVDK

SEQ ID NO: 22121 - protein, 9 aa, Homo sapiens
  AACR GENIE Results; ASXL1_p.S1028L; A6801
VTKGSLVDK

SEQ ID NO: 22122 - protein, 8 aa, Homo sapiens
  AACR GENIE Results; ASXL1_p.S1028L; B0801
AAVTKGSL

SEQ ID NO: 22123 - protein, 9 aa, Homo sapiens
  AACR GENIE Results; ATM_p.A2274V; B1501
TQLPERVIF

SEQ ID NO: 22124 - protein, 8 aa, Homo sapiens
  AACR GENIE Results; ATM_p.A2274V; B1501
VIFQIKQY

SEQ ID NO: 22125 - protein, 9 aa, Homo sapiens
  AACR GENIE Results; ATM_p.A2274V; B5701
RVIFQIKQY

SEQ ID NO: 22126 - protein, 9 aa, Homo sapiens
  AACR GENIE Results; ATM_p.A2274V; B5101
LPERVIFQI

SEQ ID NO: 22127 - protein, 9 aa, Homo sapiens
  AACR GENIE Results; ATM_p.A2274V; B1501
RVIFQIKQY

SEQ ID NO: 22128 - protein, 10 aa, Homo sapiens
  AACR GENIE Results; ATM_p.D2708N; A3303
DCVGSNGKER

SEQ ID NO: 22129 - protein, 10 aa, Homo sapiens
  AACR GENIE Results; ATM_p.D2708N; A6801
DCVGSNGKER

SEQ ID NO: 22130 - protein, 10 aa, Homo sapiens
  AACR GENIE Results; ATM_p.D2720Y; C0401
RYDLRQDAVM

SEQ ID NO: 22131 - protein, 9 aa, Homo sapiens
  AACR GENIE Results; ATM_p.D2721N; B3701
RDNLRQDAV

SEQ ID NO: 22132 - protein, 9 aa, Homo sapiens
  AACR GENIE Results; ATM_p.F2732L; B1501
AVMQQVLQM

SEQ ID NO: 22133 - protein, 9 aa, Homo sapiens
  AACR GENIE Results; ATM_p.F2732L; A1101
AVMQQVLQM

SEQ ID NO: 22134 - protein, 8 aa, Homo sapiens
  AACR GENIE Results; ATM_p.F2732L; B5101
DAVMQQVL

SEQ ID NO: 22135 - protein, 9 aa, Homo sapiens
  AACR GENIE Results; ATM_p.F2732L; A0301
AVMQQVLQM

SEQ ID NO: 22136 - protein, 8 aa, Homo sapiens
  AACR GENIE Results; ATM_p.F2732L; B0801
DAVMQQVL

SEQ ID NO: 22137 - protein, 9 aa, Homo sapiens
  AACR GENIE Results; ATM_p.F2732L; A0201
AVMQQVLQM

SEQ ID NO: 22138 - protein, 8 aa, Homo sapiens
  AACR GENIE Results; ATM_p.F2732L; B3501
DAVMQQVL

SEQ ID NO: 22139 - protein, 9 aa, Homo sapiens
  AACR GENIE Results; ATM_p.F2732L; A2601
AVMQQVLQM

SEQ ID NO: 22140 - protein, 9 aa, Homo sapiens
  AACR GENIE Results; ATM_p.F2732L; B3501
AVMQQVLQM

SEQ ID NO: 22141 - protein, 8 aa, Homo sapiens
  AACR GENIE Results; ATM_p.G2891D; C0501
HIDLDVAF

SEQ ID NO: 22142 - protein, 9 aa, Homo sapiens
  AACR GENIE Results; ATM_p.G2891D; B1501
VHIDLDVAF

SEQ ID NO: 22143 - protein, 9 aa, Homo sapiens
  AACR GENIE Results; ATM_p.G2891D; B3501
VHIDLDVAF

SEQ ID NO: 22144 - protein, 11 aa, Homo sapiens
  AACR GENIE Results; ATM_p.H2038Q; A0301
RTYEQEAMWGK

SEQ ID NO: 22145 - protein, 11 aa, Homo sapiens
  AACR GENIE Results; ATM_p.H2038Q; A1101
RTYEQEAMWGK

SEQ ID NO: 22146 - protein, 9 aa, Homo sapiens
  AACR GENIE Results; ATM_p.H2038Q; B4402
QEAMWGKAL

SEQ ID NO: 22147 - protein, 10 aa, Homo sapiens
  AACR GENIE Results; ATM_p.L1419I; B0702
SPDSYQKIIL

SEQ ID NO: 22148 - protein, 9 aa, Homo sapiens
  AACR GENIE Results; ATM_p.L1419I; A2301
SYQKIILAI

SEQ ID NO: 22149 - protein, 9 aa, Homo sapiens
  AACR GENIE Results; ATM_p.L1419I; A2402
SYQKIILAI

SEQ ID NO: 22150 - protein, 8 aa, Homo sapiens
  AACR GENIE Results; ATM_p.L1419I; B0801
DSYQKIIL

SEQ ID NO: 22151 - protein, 9 aa, Homo sapiens
  AACR GENIE Results; ATM_p.L1419I; B5101
SPDSYQKII

SEQ ID NO: 22152 - protein, 8 aa, Homo sapiens
  AACR GENIE Results; ATM_p.L1419I; B1402
DSYQKIIL

SEQ ID NO: 22153 - protein, 10 aa, Homo sapiens
  AACR GENIE Results; ATM_p.L1419I; B3501
SPDSYQKIIL

SEQ ID NO: 22154 - protein, 8 aa, Homo sapiens
  AACR GENIE Results; ATM_p.L1419I; B5101
DSYQKIIL

SEQ ID NO: 22155 - protein, 9 aa, Homo sapiens
  AACR GENIE Results; ATM_p.L2877F; C0304
FINEQSAEL

SEQ ID NO: 22156 - protein, 9 aa, Homo sapiens
  AACR GENIE Results; ATM_p.L2877F; C0303
FINEQSAEL

SEQ ID NO: 22157 - protein, 9 aa, Homo sapiens
  AACR GENIE Results; ATM_p.L2877F; A0201
FINEQSAEL

SEQ ID NO: 22158 - protein, 9 aa, Homo sapiens
  AACR GENIE Results; ATM_p.L2877F; C0102
FINEQSAEL

SEQ ID NO: 22159 - protein, 9 aa, Homo sapiens
  AACR GENIE Results; ATM_p.L2877F; B1501
FINEQSAEL

SEQ ID NO: 22160 - protein, 9 aa, Homo sapiens
  AACR GENIE Results; ATM_p.L2877F; B3501
FINEQSAEL

SEQ ID NO: 22161 - protein, 9 aa, Homo sapiens
  AACR GENIE Results; ATM_p.L2877F; C0202
FINEQSAEL

SEQ ID NO: 22162 - protein, 9 aa, Homo sapiens
  AACR GENIE Results; ATM_p.L2877F; B0801
FINEQSAEL

SEQ ID NO: 22163 - protein, 10 aa, Homo sapiens
  AACR GENIE Results; ATM_p.L2877F; A2402
IFINEQSAEL

SEQ ID NO: 22164 - protein, 9 aa, Homo sapiens
  AACR GENIE Results; ATM_p.L2877F; B0702
FINEQSAEL

SEQ ID NO: 22165 - protein, 8 aa, Homo sapiens
  AACR GENIE Results; ATM_p.P2699L; A1101
AGGVNLLK

SEQ ID NO: 22166 - protein, 9 aa, Homo sapiens
  AACR GENIE Results; ATM_p.P2699L; A0201
NLLKIIDCV

SEQ ID NO: 22167 - protein, 10 aa, Homo sapiens
  AACR GENIE Results; ATM_p.P2699L; A0301
RLAGGVNLLK

SEQ ID NO: 22168 - protein, 9 aa, Homo sapiens
  AACR GENIE Results; ATM_p.P2699L; A1101
LAGGVNLLK

SEQ ID NO: 22169 - protein, 9 aa, Homo sapiens
  AACR GENIE Results; ATM_p.P2699L; A0301
RLAGGVNLL

SEQ ID NO: 22170 - protein, 8 aa, Homo sapiens
  AACR GENIE Results; ATM_p.Q2724K; B0801
DLRKDAVM

SEQ ID NO: 22171 - protein, 9 aa, Homo sapiens
  AACR GENIE Results; ATM_p.Q2724K; B0702
KDAVMQQVF

SEQ ID NO: 22172 - protein, 9 aa, Homo sapiens
  AACR GENIE Results; ATM_p.Q2724K; B4402
KDAVMQQVF

SEQ ID NO: 22173 - protein, 9 aa, Homo sapiens
  AACR GENIE Results; ATM_p.Q2730L; C0602
LRQDAVMQL

SEQ ID NO: 22174 - protein, 8 aa, Homo sapiens
  AACR GENIE Results; ATM_p.Q2730L; B3501
DAVMQLVF

SEQ ID NO: 22175 - protein, 9 aa, Homo sapiens
  AACR GENIE Results; ATM_p.Q2730L; A1101
AVMQLVFQM

SEQ ID NO: 22176 - protein, 9 aa, Homo sapiens
  AACR GENIE Results; ATM_p.Q2730L; C0702
LRQDAVMQL

SEQ ID NO: 22177 - protein, 9 aa, Homo sapiens
  AACR GENIE Results; ATM_p.Q2730L; C0701
LRQDAVMQL

SEQ ID NO: 22178 - protein, 9 aa, Homo sapiens
  AACR GENIE Results; ATM_p.Q2730L; A0201
AVMQLVFQM

SEQ ID NO: 22179 - protein, 9 aa, Homo sapiens
  AACR GENIE Results; ATM_p.R2227C; B1302
ALCTVILEI

SEQ ID NO: 22180 - protein, 9 aa, Homo sapiens
  AACR GENIE Results; ATM_p.R2227C; B5101
EPIMALCTV

SEQ ID NO: 22181 - protein, 9 aa, Homo sapiens
  AACR GENIE Results; ATM_p.R2227C; A0201
ALCTVILEI

SEQ ID NO: 22182 - protein, 9 aa, Homo sapiens
  AACR GENIE Results; ATM_p.R2443Q; C0304
YTVKVQQEL

SEQ ID NO: 22183 - protein, 9 aa, Homo sapiens
  AACR GENIE Results; ATM_p.R2443Q; C0303
YTVKVQQEL

SEQ ID NO: 22184 - protein, 9 aa, Homo sapiens
  AACR GENIE Results; ATM_p.R2443Q; C1502
YTVKVQQEL

SEQ ID NO: 22185 - protein, 10 aa, Homo sapiens
  AACR GENIE Results; ATM_p.R2443Q; B4001
QELELDELAL

SEQ ID NO: 22186 - protein, 9 aa, Homo sapiens
  AACR GENIE Results; ATM_p.R2443Q; B1302
YTVKVQQEL

SEQ ID NO: 22187 - protein, 8 aa, Homo sapiens
  AACR GENIE Results; ATM_p.R2443Q; B0801
TVKVQQEL

SEQ ID NO: 22188 - protein, 10 aa, Homo sapiens
  AACR GENIE Results; ATM_p.R2443Q; A3001
QELELDELAL

SEQ ID NO: 22189 - protein, 9 aa, Homo sapiens
  AACR GENIE Results; ATM_p.R2443Q; A3001
YTVKVQQEL

SEQ ID NO: 22190 - protein, 9 aa, Homo sapiens
  AACR GENIE Results; ATM_p.R2443Q; B5701
YTVKVQQEL

SEQ ID NO: 22191 - protein, 9 aa, Homo sapiens
  AACR GENIE Results; ATM_p.R2443Q; C1203
YTVKVQQEL

SEQ ID NO: 22192 - protein, 9 aa, Homo sapiens
  AACR GENIE Results; ATM_p.R2443Q; C1601
YTVKVQQEL

SEQ ID NO: 22193 - protein, 8 aa, Homo sapiens
  AACR GENIE Results; ATM_p.R2443Q; B1501
TVKVQQEL

SEQ ID NO: 22194 - protein, 9 aa, Homo sapiens
  AACR GENIE Results; ATM_p.R2443Q; C0202
YTVKVQQEL

SEQ ID NO: 22195 - protein, 9 aa, Homo sapiens
  AACR GENIE Results; ATM_p.R2443Q; B4001
YTVKVQQEL

SEQ ID NO: 22196 - protein, 9 aa, Homo sapiens
  AACR GENIE Results; ATM_p.R2443Q; A6801
YTVKVQQEL

SEQ ID NO: 22197 - protein, 9 aa, Homo sapiens
  AACR GENIE Results; ATM_p.R2443Q; B3501
YTVKVQQEL

SEQ ID NO: 22198 - protein, 9 aa, Homo sapiens
  AACR GENIE Results; ATM_p.R3008C; A0301
KVAECVLMR

SEQ ID NO: 22199 - protein, 9 aa, Homo sapiens
  AACR GENIE Results; ATM_p.R3008C; A1101
KVAECVLMR

SEQ ID NO: 22200 - protein, 9 aa, Homo sapiens
  AACR GENIE Results; ATM_p.R3008C; B5001
QSFNKVAEC

SEQ ID NO: 22201 - protein, 9 aa, Homo sapiens
  AACR GENIE Results; ATM_p.R3008C; A3101
KVAECVLMR

SEQ ID NO: 22202 - protein, 9 aa, Homo sapiens
  AACR GENIE Results; ATM_p.R3008H; A0301
KVAEHVLMR

SEQ ID NO: 22203 - protein, 9 aa, Homo sapiens
  AACR GENIE Results; ATM_p.R3008H; A1101
KVAEHVLMR

SEQ ID NO: 22204 - protein, 10 aa, Homo sapiens
  AACR GENIE Results; ATM_p.R3008H; A0301
KVAEHVLMRL

SEQ ID NO: 22205 - protein, 9 aa, Homo sapiens
  AACR GENIE Results; ATM_p.R3008H; A3101
KVAEHVLMR

SEQ ID NO: 22206 - protein, 9 aa, Homo sapiens
  AACR GENIE Results; ATM_p.R3008H; A6801
KVAEHVLMR

SEQ ID NO: 22207 - protein, 8 aa, Homo sapiens
  AACR GENIE Results; ATM_p.R3008H; B4403
AEHVLMRL

SEQ ID NO: 22208 - protein, 9 aa, Homo sapiens
  AACR GENIE Results; ATM_p.R337C; A2402
KYSSGFCNI

SEQ ID NO: 22209 - protein, 9 aa, Homo sapiens
  AACR GENIE Results; ATM_p.R337C; A2301
KYSSGFCNI

SEQ ID NO: 22210 - protein, 9 aa, Homo sapiens
  AACR GENIE Results; ATM_p.R337H; A2402
KYSSGFHNI

SEQ ID NO: 22211 - protein, 9 aa, Homo sapiens
  AACR GENIE Results; ATM_p.R337H; A2301
KYSSGFHNI

SEQ ID NO: 22212 - protein, 9 aa, Homo sapiens
  AACR GENIE Results; ATM_p.R337H; C1203
YSSGFHNIA

SEQ ID NO: 22213 - protein, 9 aa, Homo sapiens
  AACR GENIE Results; ATM_p.R337H; A1101
SGFHNIAVK

SEQ ID NO: 22214 - protein, 9 aa, Homo sapiens
  AACR GENIE Results; ATM_p.R337H; B3801
HNIAVKENL

SEQ ID NO: 22215 - protein, 9 aa, Homo sapiens
  AACR GENIE Results; ATM_p.R337H; C1502
SSGFHNIAV

SEQ ID NO: 22216 - protein, 9 aa, Homo sapiens
  AACR GENIE Results; ATM_p.R337H; A3001
SGFHNIAVK

SEQ ID NO: 22217 - protein, 10 aa, Homo sapiens
  AACR GENIE Results; ATM_p.R337H; C1502
YSSGFHNIAV

SEQ ID NO: 22218 - protein, 9 aa, Homo sapiens
  AACR GENIE Results; ATM_p.R337H; A3001
YSSGFHNIA

SEQ ID NO: 22219 - protein, 10 aa, Homo sapiens
  AACR GENIE Results; ATM_p.R337H; B3801
FHNIAVKENL

SEQ ID NO: 22220 - protein, 9 aa, Homo sapiens
  AACR GENIE Results; ATM_p.R337H; A6801
SGFHNIAVK

SEQ ID NO: 22221 - protein, 9 aa, Homo sapiens
  AACR GENIE Results; ATM_p.R337H; A0301
SGFHNIAVK

SEQ ID NO: 22222 - protein, 10 aa, Homo sapiens
  AACR GENIE Results; ATM_p.S2812Vfs*3; B5701
KMMEVQKKVF

SEQ ID NO: 22223 - protein, 8 aa, Homo sapiens
  AACR GENIE Results; ATM_p.S2812Vfs*3; B1801
MEVQKKVF

SEQ ID NO: 22224 - protein, 8 aa, Homo sapiens
  AACR GENIE Results; ATM_p.S2812Vfs*3; B0801
MEVQKKVF

SEQ ID NO: 22225 - protein, 10 aa, Homo sapiens
  AACR GENIE Results; ATM_p.S2812Vfs*3; B1501
KMMEVQKKVF

SEQ ID NO: 22226 - protein, 8 aa, Homo sapiens
  AACR GENIE Results; ATM_p.S2812Vfs*3; B4403
MEVQKKVF

SEQ ID NO: 22227 - protein, 9 aa, Homo sapiens
  AACR GENIE Results; ATM_p.S2812Vfs*3; A0201
KMMEVQKKV

SEQ ID NO: 22228 - protein, 10 aa, Homo sapiens
  AACR GENIE Results; ATM_p.S2812Vfs*3; B4403
KMMEVQKKVF

SEQ ID NO: 22229 - protein, 10 aa, Homo sapiens
  AACR GENIE Results; ATM_p.S2812Vfs*3; A0301
KMMEVQKKVF

SEQ ID NO: 22230 - protein, 10 aa, Homo sapiens
  AACR GENIE Results; ATM_p.S2812Vfs*3; A2402
KMMEVQKKVF

SEQ ID NO: 22231 - protein, 9 aa, Homo sapiens
  AACR GENIE Results; ATM_p.T1697A; C0602
SYAKALKLF

SEQ ID NO: 22232 - protein, 9 aa, Homo sapiens
  AACR GENIE Results; ATM_p.T1697A; A2402
SYAKALKLF

SEQ ID NO: 22233 - protein, 9 aa, Homo sapiens
  AACR GENIE Results; ATM_p.T1697A; A0301
ASYAKALKL

SEQ ID NO: 22234 - protein, 9 aa, Homo sapiens
  AACR GENIE Results; ATM_p.T1697A; C1203
ASYAKALKL

SEQ ID NO: 22235 - protein, 8 aa, Homo sapiens
  AACR GENIE Results; ATM_p.T1697A; B5101
DASYAKAL

SEQ ID NO: 22236 - protein, 9 aa, Homo sapiens
  AACR GENIE Results; ATM_p.T1697A; A1101
ASYAKALKL

SEQ ID NO: 22237 - protein, 8 aa, Homo sapiens
  AACR GENIE Results; ATM_p.T1697A; B0801
DASYAKAL

SEQ ID NO: 22238 - protein, 9 aa, Homo sapiens
  AACR GENIE Results; ATM_p.T1697A; B0702
KDASYAKAL

SEQ ID NO: 22239 - protein, 9 aa, Homo sapiens
  AACR GENIE Results; ATM_p.T1697A; A1101
HSKDASYAK

SEQ ID NO: 22240 - protein, 9 aa, Homo sapiens
  AACR GENIE Results; ATM_p.T1697A; B4403
KDASYAKAL

SEQ ID NO: 22241 - protein, 9 aa, Homo sapiens
  AACR GENIE Results; ATM_p.T1697A; C1601
ASYAKALKL

SEQ ID NO: 22242 - protein, 9 aa, Homo sapiens
  AACR GENIE Results; ATM_p.T1697A; C0304
ASYAKALKL

SEQ ID NO: 22243 - protein, 10 aa, Homo sapiens
  AACR GENIE Results; ATM_p.V2424G; A3101
RAKEEGGLLR

SEQ ID NO: 22244 - protein, 9 aa, Homo sapiens
  AACR GENIE Results; ATM_p.V2424G; B4402
EEGGLLREH

SEQ ID NO: 22245 - protein, 9 aa, Homo sapiens
  AACR GENIE Results; ATM_p.V2424G; B0702
RAKEEGGLL

SEQ ID NO: 22246 - protein, 9 aa, Homo sapiens
  AACR GENIE Results; ATM_p.W2960L; C0304
LTMNPLKAL

SEQ ID NO: 22247 - protein, 9 aa, Homo sapiens
  AACR GENIE Results; ATM_p.W2960L; C0401
LFDLTMNPL

SEQ ID NO: 22248 - protein, 8 aa, Homo sapiens
  AACR GENIE Results; ATM_p.W2960L; B3501
DPLFDLTM

SEQ ID NO: 22249 - protein, 9 aa, Homo sapiens
  AACR GENIE Results; ATM_p.W2960L; A0201
LLYDPLFDL

SEQ ID NO: 22250 - protein, 10 aa, Homo sapiens
  AACR GENIE Results; ATM_p.W2960L; A2601
LTMNPLKALY

SEQ ID NO: 22251 - protein, 8 aa, Homo sapiens
  AACR GENIE Results; ATM_p.W2960L; C0702
LYDPLFDL

SEQ ID NO: 22252 - protein, 11 aa, Homo sapiens
  AACR GENIE Results; ATM_p.W2960L; A0201
LLYDPLFDLTM

SEQ ID NO: 22253 - protein, 10 aa, Homo sapiens
  AACR GENIE Results; ATM_p.W2960L; A0101
LTMNPLKALY

SEQ ID NO: 22254 - protein, 8 aa, Homo sapiens
  AACR GENIE Results; ATM_p.W412L; B5101
DLVPLLQI

SEQ ID NO: 22255 - protein, 10 aa, Homo sapiens
  AACR GENIE Results; ATM_p.W412L; B0702
VPLLQIATQL

SEQ ID NO: 22256 - protein, 8 aa, Homo sapiens
  AACR GENIE Results; ATM_p.W412L; C0401
DFDLVPLL

SEQ ID NO: 22257 - protein, 8 aa, Homo sapiens
  AACR GENIE Results; ATR_p.D1560N; B3801
KHDNQHTI

SEQ ID NO: 22258 - protein, 9 aa, Homo sapiens
  AACR GENIE Results; ATRX_p.A345T; A1101
SYSTLIVPK

SEQ ID NO: 22259 - protein, 11 aa, Homo sapiens
  AACR GENIE Results; ATRX_p.A345T; A1101
STLIVPKEMIK

SEQ ID NO: 22260 - protein, 11 aa, Homo sapiens
  AACR GENIE Results; ATRX_p.A345T; A0301
TLIVPKEMIKK

SEQ ID NO: 22261 - protein, 9 aa, Homo sapiens
  AACR GENIE Results; ATRX_p.A345T; A0301
SYSTLIVPK

SEQ ID NO: 22262 - protein, 10 aa, Homo sapiens
  AACR GENIE Results; ATRX_p.A345T; A1101
YSYSTLIVPK

SEQ ID NO: 22263 - protein, 9 aa, Homo sapiens
  AACR GENIE Results; ATRX_p.A345T; B5701
STLIVPKEM

SEQ ID NO: 22264 - protein, 9 aa, Homo sapiens
  AACR GENIE Results; ATRX_p.A345T; A6801
SYSTLIVPK

SEQ ID NO: 22265 - protein, 8 aa, Homo sapiens
  AACR GENIE Results; ATRX_p.A345T; A1101
YSTLIVPK

SEQ ID NO: 22266 - protein, 10 aa, Homo sapiens
  AACR GENIE Results; ATRX_p.A345T; A0301
YSYSTLIVPK

SEQ ID NO: 22267 - protein, 9 aa, Homo sapiens
  AACR GENIE Results; ATRX_p.A345T; A1101
STLIVPKEM

SEQ ID NO: 22268 - protein, 9 aa, Homo sapiens
  AACR GENIE Results; ATRX_p.A345T; C1601
STLIVPKEM

SEQ ID NO: 22269 - protein, 9 aa, Homo sapiens
  AACR GENIE Results; ATRX_p.S1155L; B4001
KEIQSGSSL

SEQ ID NO: 22270 - protein, 9 aa, Homo sapiens
  AACR GENIE Results; ATRX_p.S1155L; B0702
KEIQSGSSL

SEQ ID NO: 22271 - protein, 9 aa, Homo sapiens
  AACR GENIE Results; ATRX_p.S1155L; B1501
KEIQSGSSL

SEQ ID NO: 22272 - protein, 9 aa, Homo sapiens
  AACR GENIE Results; ATRX_p.S1155L; B4403
KEIQSGSSL

SEQ ID NO: 22273 - protein, 9 aa, Homo sapiens
  AACR GENIE Results; ATRX_p.S1155L; B4402
KEIQSGSSL

SEQ ID NO: 22274 - protein, 9 aa, Homo sapiens
  AACR GENIE Results; ATRX_p.S1155L; C0304
KEIQSGSSL

SEQ ID NO: 22275 - protein, 9 aa, Homo sapiens
  AACR GENIE Results; ATRX_p.S1155L; C0102
KEIQSGSSL

SEQ ID NO: 22276 - protein, 9 aa, Homo sapiens
  AACR GENIE Results; ATRX_p.S1155L; C0303
KEIQSGSSL

SEQ ID NO: 22277 - protein, 8 aa, Homo sapiens
  AACR GENIE Results; ATRX_p.S1174F; B0801
SFKKKAVI

SEQ ID NO: 22278 - protein, 9 aa, Homo sapiens
  AACR GENIE Results; ATRX_p.V1731F; B3501
EASAFSKAM

SEQ ID NO: 22279 - protein, 10 aa, Homo sapiens
  AACR GENIE Results; ATRX_p.V1731F; B4402
NEASAFSKAM

SEQ ID NO: 22280 - protein, 9 aa, Homo sapiens
  AACR GENIE Results; ATRX_p.V1731F; B0702
AFSKAMNSI

SEQ ID NO: 22281 - protein, 11 aa, Homo sapiens
  AACR GENIE Results; ATRX_p.V1731F; A0301
ILKNEASAFSK

SEQ ID NO: 22282 - protein, 9 aa, Homo sapiens
  AACR GENIE Results; ATRX_p.V1731F; B0801
ILKNEASAF

SEQ ID NO: 22283 - protein, 8 aa, Homo sapiens
  AACR GENIE Results; ATRX_p.V1731F; C1203
FSKAMNSI

SEQ ID NO: 22284 - protein, 9 aa, Homo sapiens
  AACR GENIE Results; ATRX_p.V1731F; B0702
ILKNEASAF

SEQ ID NO: 22285 - protein, 9 aa, Homo sapiens
  AACR GENIE Results; ATRX_p.V1731F; A0301
ILKNEASAF

SEQ ID NO: 22286 - protein, 9 aa, Homo sapiens
  AACR GENIE Results; AXIN2_p.M5Vfs*14; B5101
LPPGPQQQL

SEQ ID NO: 22287 - protein, 10 aa, Homo sapiens
  AACR GENIE Results; B2M_p.L15Ffs*41; A2902
SFWPGGYPAY

SEQ ID NO: 22288 - protein, 8 aa, Homo sapiens
  AACR GENIE Results; B2M_p.L15Ffs*41; B5701
LTSSSREW

SEQ ID NO: 22289 - protein, 9 aa, Homo sapiens
  AACR GENIE Results; B2M_p.R101P; C0102
ACPVNHVTL

SEQ ID NO: 22290 - protein, 10 aa, Homo sapiens
  AACR GENIE Results; B2M_p.R101P; C0304
YACPVNHVTL

SEQ ID NO: 22291 - protein, 10 aa, Homo sapiens
  AACR GENIE Results; B2M_p.R101P; C0303
YACPVNHVTL

SEQ ID NO: 22292 - protein, 10 aa, Homo sapiens
  AACR GENIE Results; B2M_p.R101P; C1203
YACPVNHVTL

SEQ ID NO: 22293 - protein, 8 aa, Homo sapiens
  AACR GENIE Results; B2M_p.R101P; B5101
YACPVNHV

SEQ ID NO: 22294 - protein, 8 aa, Homo sapiens
  AACR GENIE Results; B2M_p.R101P; B0801
CPVNHVTL

SEQ ID NO: 22295 - protein, 8 aa, Homo sapiens
  AACR GENIE Results; B2M_p.R101P; B0702
CPVNHVTL

SEQ ID NO: 22296 - protein, 9 aa, Homo sapiens
  AACR GENIE Results; B2M_p.R101P; B1801
DEYACPVNH

SEQ ID NO: 22297 - protein, 9 aa, Homo sapiens
  AACR GENIE Results; BAP1_p.P293L; C1203
SASNKSLLV

SEQ ID NO: 22298 - protein, 9 aa, Homo sapiens
  AACR GENIE Results; BAP1_p.Y173C; B5101
EAFHFVSCV

SEQ ID NO: 22299 - protein, 9 aa, Homo sapiens
  AACR GENIE Results; BAP1_p.Y173C; A1101
VSCVPITGR

SEQ ID NO: 22300 - protein, 9 aa, Homo sapiens
  AACR GENIE Results; BCL6_p.N73S; B1302
SVISLDPEI

SEQ ID NO: 22301 - protein, 9 aa, Homo sapiens
  AACR GENIE Results; BCL6_p.N73S; A0201
SVISLDPEI

SEQ ID NO: 22302 - protein, 9 aa, Homo sapiens
  AACR GENIE Results; BCL6_p.N73S; B3801
SVISLDPEI

SEQ ID NO: 22303 - protein, 9 aa, Homo sapiens
  AACR GENIE Results; BCL6_p.N73S; A2601
SVISLDPEI

SEQ ID NO: 22304 - protein, 9 aa, Homo sapiens
  AACR GENIE Results; BLM_p.H281P; B4001
AELPSTEKV

SEQ ID NO: 22305 - protein, 9 aa, Homo sapiens
  AACR GENIE Results; BLM_p.H281P; B4403
AELPSTEKV

SEQ ID NO: 22306 - protein, 9 aa, Homo sapiens
  AACR GENIE Results; BLM_p.P822S; C0304
FSSVPVMAL

SEQ ID NO: 22307 - protein, 9 aa, Homo sapiens
  AACR GENIE Results; BLM_p.P822S; C1203
FSSVPVMAL

SEQ ID NO: 22308 - protein, 9 aa, Homo sapiens
  AACR GENIE Results; BLM_p.S232R; B4403
SEWLRSDVI

SEQ ID NO: 22309 - protein, 10 aa, Homo sapiens
  AACR GENIE Results; BMPR1A_p.R480Q; B5701
RLQPIVSNRW

SEQ ID NO: 22310 - protein, 9 aa, Homo sapiens
  AACR GENIE Results; BMPR1A_p.R480Q; A0301
RLQPIVSNR

SEQ ID NO: 22311 - protein, 9 aa, Homo sapiens
  AACR GENIE Results; BMPR1A_p.R486W; B5701
RLRPIVSNW

SEQ ID NO: 22312 - protein, 10 aa, Homo sapiens
  AACR GENIE Results; BMPR1A_p.R486W; B5701
RLRPIVSNWW

SEQ ID NO: 22313 - protein, 9 aa, Homo sapiens
  AACR GENIE Results; BRAF_p.D594G; A1101
GGFGLATVK

SEQ ID NO: 22314 - protein, 9 aa, Homo sapiens
  AACR GENIE Results; BRAF_p.D594G; A3001
TVKIGGFGL

SEQ ID NO: 22315 - protein, 9 aa, Homo sapiens
  AACR GENIE Results; BRAF_p.D594N; A1101
GNFGLATVK

SEQ ID NO: 22316 - protein, 9 aa, Homo sapiens
  AACR GENIE Results; BRAF_p.D594N; A3001
TVKIGNFGL

SEQ ID NO: 22317 - protein, 9 aa, Homo sapiens
  AACR GENIE Results; BRAF_p.G464V; B1501
GQRIVSGSF

SEQ ID NO: 22318 - protein, 9 aa, Homo sapiens
  AACR GENIE Results; BRAF_p.G464V; B1501
VSGSFGTVY

SEQ ID NO: 22319 - protein, 10 aa, Homo sapiens
  AACR GENIE Results; BRAF_p.G464V; B1501
IVSGSFGTVY

SEQ ID NO: 22320 - protein, 11 aa, Homo sapiens
  AACR GENIE Results; BRAF_p.G464V; A1101
IVSGSFGTVYK

SEQ ID NO: 22321 - protein, 11 aa, Homo sapiens
  AACR GENIE Results; BRAF_p.G464V; B1501
RIVSGSFGTVY

SEQ ID NO: 22322 - protein, 10 aa, Homo sapiens
  AACR GENIE Results; BRAF_p.G464V; A1101
VSGSFGTVYK

SEQ ID NO: 22323 - protein, 9 aa, Homo sapiens
  AACR GENIE Results; BRAF_p.G466A; B1501
GQRIGSASF

SEQ ID NO: 22324 - protein, 10 aa, Homo sapiens
  AACR GENIE Results; BRAF_p.G466A; A1101
GSASFGTVYK

SEQ ID NO: 22325 - protein, 9 aa, Homo sapiens
  AACR GENIE Results; BRAF_p.G466A; B1501
GSASFGTVY

SEQ ID NO: 22326 - protein, 9 aa, Homo sapiens
  AACR GENIE Results; BRAF_p.G466A; A1101
SASFGTVYK

SEQ ID NO: 22327 - protein, 10 aa, Homo sapiens
  AACR GENIE Results; BRAF_p.G466A; A0301
GSASFGTVYK

SEQ ID NO: 22328 - protein, 8 aa, Homo sapiens
  AACR GENIE Results; BRAF_p.G466A; A1101
ASFGTVYK

SEQ ID NO: 22329 - protein, 10 aa, Homo sapiens
  AACR GENIE Results; BRAF_p.G466A; A1101
ASFGTVYKGK

SEQ ID NO: 22330 - protein, 11 aa, Homo sapiens
  AACR GENIE Results; BRAF_p.G466A; B1501
RIGSASFGTVY

SEQ ID NO: 22331 - protein, 8 aa, Homo sapiens
  AACR GENIE Results; BRAF_p.G466A; B1501
SASFGTVY

SEQ ID NO: 22332 - protein, 9 aa, Homo sapiens
  AACR GENIE Results; BRAF_p.G466E; A0101
GSESFGTVY

SEQ ID NO: 22333 - protein, 9 aa, Homo sapiens
  AACR GENIE Results; BRAF_p.G466R; B1501
GQRIGSRSF

SEQ ID NO: 22334 - protein, 9 aa, Homo sapiens
  AACR GENIE Results; BRAF_p.G466R; B1501
GSRSFGTVY

SEQ ID NO: 22335 - protein, 10 aa, Homo sapiens
  AACR GENIE Results; BRAF_p.G466R; A0301
GSRSFGTVYK

SEQ ID NO: 22336 - protein, 9 aa, Homo sapiens
  AACR GENIE Results; BRAF_p.G466V; B1501
GQRIGSVSF

SEQ ID NO: 22337 - protein, 9 aa, Homo sapiens
  AACR GENIE Results; BRAF_p.G466V; A1101
SVSFGTVYK

SEQ ID NO: 22338 - protein, 10 aa, Homo sapiens
  AACR GENIE Results; BRAF_p.G466V; A1101
GSVSFGTVYK

SEQ ID NO: 22339 - protein, 9 aa, Homo sapiens
  AACR GENIE Results; BRAF_p.G466V; B1501
GSVSFGTVY

SEQ ID NO: 22340 - protein, 9 aa, Homo sapiens
  AACR GENIE Results; BRAF_p.G466V; A0301
SVSFGTVYK

SEQ ID NO: 22341 - protein, 11 aa, Homo sapiens
  AACR GENIE Results; BRAF_p.G466V; B5701
VSFGTVYKGKW

SEQ ID NO: 22342 - protein, 9 aa, Homo sapiens
  AACR GENIE Results; BRAF_p.G466V; B5801
GSVSFGTVY

SEQ ID NO: 22343 - protein, 10 aa, Homo sapiens
  AACR GENIE Results; BRAF_p.G466V; A0301
GSVSFGTVYK

SEQ ID NO: 22344 - protein, 9 aa, Homo sapiens
  AACR GENIE Results; BRAF_p.G466V; A3002
GSVSFGTVY

SEQ ID NO: 22345 - protein, 8 aa, Homo sapiens
  AACR GENIE Results; BRAF_p.G466V; B1501
SVSFGTVY

SEQ ID NO: 22346 - protein, 9 aa, Homo sapiens
  AACR GENIE Results; BRAF_p.G466V; A6801
SVSFGTVYK

SEQ ID NO: 22347 - protein, 9 aa, Homo sapiens
  AACR GENIE Results; BRAF_p.G469A; A1101
SGSFATVYK

SEQ ID NO: 22348 - protein, 9 aa, Homo sapiens
  AACR GENIE Results; BRAF_p.G469A; B1501
GSGSFATVY

SEQ ID NO: 22349 - protein, 10 aa, Homo sapiens
  AACR GENIE Results; BRAF_p.G469A; A1101
GSGSFATVYK

SEQ ID NO: 22350 - protein, 9 aa, Homo sapiens
  AACR GENIE Results; BRAF_p.G469A; A3002
GSGSFATVY

SEQ ID NO: 22351 - protein, 11 aa, Homo sapiens
  AACR GENIE Results; BRAF_p.G469A; B3901
QRIGSGSFATV

SEQ ID NO: 22352 - protein, 10 aa, Homo sapiens
  AACR GENIE Results; BRAF_p.G469A; A3002
IGSGSFATVY

SEQ ID NO: 22353 - protein, 8 aa, Homo sapiens
  AACR GENIE Results; BRAF_p.G469A; A1101
GSFATVYK

SEQ ID NO: 22354 - protein, 11 aa, Homo sapiens
  AACR GENIE Results; BRAF_p.G469A; B1501
RIGSGSFATVY

SEQ ID NO: 22355 - protein, 9 aa, Homo sapiens
  AACR GENIE Results; BRAF_p.G469R; B1501
GSGSFRTVY

SEQ ID NO: 22356 - protein, 9 aa, Homo sapiens
  AACR GENIE Results; BRAF_p.G469R; A1101
SGSFRTVYK

SEQ ID NO: 22357 - protein, 9 aa, Homo sapiens
  AACR GENIE Results; BRAF_p.G469S; A1101
SGSFSTVYK

SEQ ID NO: 22358 - protein, 10 aa, Homo sapiens
  AACR GENIE Results; BRAF_p.G469S; A1101
GSGSFSTVYK

SEQ ID NO: 22359 - protein, 9 aa, Homo sapiens
  AACR GENIE Results; BRAF_p.G469S; B1501
GSGSFSTVY

SEQ ID NO: 22360 - protein, 10 aa, Homo sapiens
  AACR GENIE Results; BRAF_p.G469S; A0301
GSGSFSTVYK

SEQ ID NO: 22361 - protein, 8 aa, Homo sapiens
  AACR GENIE Results; BRAF_p.G469S; A1101
GSFSTVYK

SEQ ID NO: 22362 - protein, 11 aa, Homo sapiens
  AACR GENIE Results; BRAF_p.G469S; A1101
IGSGSFSTVYK

SEQ ID NO: 22363 - protein, 9 aa, Homo sapiens
  AACR GENIE Results; BRAF_p.G469V; A1101
SGSFVTVYK

SEQ ID NO: 22364 - protein, 9 aa, Homo sapiens
  AACR GENIE Results; BRAF_p.G469V; B1501
GSGSFVTVY

SEQ ID NO: 22365 - protein, 10 aa, Homo sapiens
  AACR GENIE Results; BRAF_p.G469V; A1101
GSGSFVTVYK

SEQ ID NO: 22366 - protein, 10 aa, Homo sapiens
  AACR GENIE Results; BRAF_p.G469V; A0301
GSGSFVTVYK

SEQ ID NO: 22367 - protein, 9 aa, Homo sapiens
  AACR GENIE Results; BRAF_p.G469V; A6801
SGSFVTVYK

SEQ ID NO: 22368 - protein, 8 aa, Homo sapiens
  AACR GENIE Results; BRAF_p.G469V; A1101
GSFVTVYK

SEQ ID NO: 22369 - protein, 8 aa, Homo sapiens
  AACR GENIE Results; BRAF_p.G469V; B1501
SGSFVTVY

SEQ ID NO: 22370 - protein, 9 aa, Homo sapiens
  AACR GENIE Results; BRAF_p.G469V; A0301
SGSFVTVYK

SEQ ID NO: 22371 - protein, 8 aa, Homo sapiens
  AACR GENIE Results; BRAF_p.K483E; B5101
VAVEMLNV

SEQ ID NO: 22372 - protein, 8 aa, Homo sapiens
  AACR GENIE Results; BRAF_p.K601E; B5701
LATVESRW

SEQ ID NO: 22373 - protein, 9 aa, Homo sapiens
  AACR GENIE Results; BRAF_p.K601E; B5701
GLATVESRW

SEQ ID NO: 22374 - protein, 10 aa, Homo sapiens
  AACR GENIE Results; BRAF_p.K601E; B5701
FGLATVESRW

SEQ ID NO: 22375 - protein, 9 aa, Homo sapiens
  AACR GENIE Results; BRAF_p.K601E; B2702
FGLATVESR

SEQ ID NO: 22376 - protein, 8 aa, Homo sapiens
  AACR GENIE Results; BRAF_p.K601N; B5701
LATVNSRW

SEQ ID NO: 22377 - protein, 10 aa, Homo sapiens
  AACR GENIE Results; BRAF_p.K601N; B5701
FGLATVNSRW

SEQ ID NO: 22378 - protein, 9 aa, Homo sapiens
  AACR GENIE Results; BRAF_p.K601N; B5701
GLATVNSRW

SEQ ID NO: 22379 - protein, 9 aa, Homo sapiens
  AACR GENIE Results; BRAF_p.L382M; B1801
DDMIRDQGF

SEQ ID NO: 22380 - protein, 11 aa, Homo sapiens
  AACR GENIE Results; BRAF_p.V600E; A0302
KIGDFGLATEK

SEQ ID NO: 22381 - protein, 11 aa, Homo sapiens
  AACR GENIE Results; BRAF_p.V600E; A0301
KIGDFGLATEK

SEQ ID NO: 22382 - protein, 9 aa, Homo sapiens
  AACR GENIE Results; BRAF_p.V600E; B2702
GDFGLATEK

SEQ ID NO: 22383 - protein, 10 aa, Homo sapiens
  AACR GENIE Results; BRAF_p.V600E; B2702
IGDFGLATEK

SEQ ID NO: 22384 - protein, 11 aa, Homo sapiens
  AACR GENIE Results; BRAF_p.V600E; B2702
KIGDFGLATEK

SEQ ID NO: 22385 - protein, 9 aa, Homo sapiens
  AACR GENIE Results; BRCA1_p.D1546N; B4001
LEESGPHNL

SEQ ID NO: 22386 - protein, 10 aa, Homo sapiens
  AACR GENIE Results; BRCA1_p.D1546N; B3501
GPHNLTETSY

SEQ ID NO: 22387 - protein, 9 aa, Homo sapiens
  AACR GENIE Results; BRCA1_p.E453D; A1101
SVDSNIEDK

SEQ ID NO: 22388 - protein, 9 aa, Homo sapiens
  AACR GENIE Results; BRCA1_p.E597K; A1101
SSISNMELK

SEQ ID NO: 22389 - protein, 9 aa, Homo sapiens
  AACR GENIE Results; BRCA1_p.K1606E; B1302
ALKVPQLEV

SEQ ID NO: 22390 - protein, 9 aa, Homo sapiens
  AACR GENIE Results; BRCA1_p.K1606E; A3001
ALKVPQLEV

SEQ ID NO: 22391 - protein, 9 aa, Homo sapiens
  AACR GENIE Results; BRCA1_p.K1606E; B1501
ALKVPQLEV

SEQ ID NO: 22392 - protein, 9 aa, Homo sapiens
  AACR GENIE Results; BRCA1_p.K1606E; A0201
ALKVPQLEV

SEQ ID NO: 22393 - protein, 9 aa, Homo sapiens
  AACR GENIE Results; BRCA2_p.S445Y; A2402
NYLPRISSL

SEQ ID NO: 22394 - protein, 9 aa, Homo sapiens
  AACR GENIE Results; BRCA2_p.S445Y; A2301
NYLPRISSL

SEQ ID NO: 22395 - protein, 10 aa, Homo sapiens
  AACR GENIE Results; BRCA2_p.S445Y; B1402
ENYLPRISSL

SEQ ID NO: 22396 - protein, 8 aa, Homo sapiens
  AACR GENIE Results; BRCA2_p.V3091I; C1701
GLAPFIYL

SEQ ID NO: 22397 - protein, 9 aa, Homo sapiens
  AACR GENIE Results; BRIP1_p.L892I; B1302
HQKVINVSI

SEQ ID NO: 22398 - protein, 9 aa, Homo sapiens
  AACR GENIE Results; BRIP1_p.L892I; B1501
HQKVINVSI

SEQ ID NO: 22399 - protein, 9 aa, Homo sapiens
  AACR GENIE Results; BRIP1_p.L892I; B0801
HQKVINVSI

SEQ ID NO: 22400 - protein, 10 aa, Homo sapiens
  AACR GENIE Results; BRIP1_p.L892I; A3101
KVINVSIKDR

SEQ ID NO: 22401 - protein, 9 aa, Homo sapiens
  AACR GENIE Results; BRIP1_p.L892I; A3001
HQKVINVSI

SEQ ID NO: 22402 - protein, 9 aa, Homo sapiens
  AACR GENIE Results; BUB1B_p.R555Q; B1501
AQQRPLAVL

SEQ ID NO: 22403 - protein, 10 aa, Homo sapiens
  AACR GENIE Results; BUB1B_p.R555Q; A1101
AQQRPLAVLK

SEQ ID NO: 22404 - protein, 9 aa, Homo sapiens
  AACR GENIE Results; BUB1B_p.R555Q; A3001
QQRPLAVLK

SEQ ID NO: 22405 - protein, 9 aa, Homo sapiens
  AACR GENIE Results; BUB1B_p.R555Q; C1502
LAQQRPLAV

SEQ ID NO: 22406 - protein, 8 aa, Homo sapiens
  AACR GENIE Results; BUB1B_p.R555Q; B1302
AQQRPLAV

SEQ ID NO: 22407 - protein, 9 aa, Homo sapiens
  AACR GENIE Results; BUB1B_p.R555Q; C1601
LAQQRPLAV

SEQ ID NO: 22408 - protein, 9 aa, Homo sapiens
  AACR GENIE Results; BUB1B_p.R555Q; A3101
QQRPLAVLK

SEQ ID NO: 22409 - protein, 9 aa, Homo sapiens
  AACR GENIE Results; BUB1B_p.R555Q; B0801
LAQQRPLAV

SEQ ID NO: 22410 - protein, 9 aa, Homo sapiens
  AACR GENIE Results; BUB1B_p.R555Q; B1302
AQQRPLAVL

SEQ ID NO: 22411 - protein, 9 aa, Homo sapiens
  AACR GENIE Results; BUB1B_p.R555Q; A0301
QQRPLAVLK

SEQ ID NO: 22412 - protein, 8 aa, Homo sapiens
  AACR GENIE Results; BUB1B_p.R555Q; B1501
QQRPLAVL

SEQ ID NO: 22413 - protein, 9 aa, Homo sapiens
  AACR GENIE Results; BUB1B_p.R555Q; B3901
AQQRPLAVL

SEQ ID NO: 22414 - protein, 9 aa, Homo sapiens
  AACR GENIE Results; BUB1B_p.R555Q; C1203
LAQQRPLAV

SEQ ID NO: 22415 - protein, 9 aa, Homo sapiens
  AACR GENIE Results; BUB1B_p.R555Q; A1101
QQRPLAVLK

SEQ ID NO: 22416 - protein, 9 aa, Homo sapiens
  AACR GENIE Results; CARD11_p.G540R; B5701
RSLPITNSF

SEQ ID NO: 22417 - protein, 9 aa, Homo sapiens
  AACR GENIE Results; CARD11_p.G540R; C0102
ASPSSCRSL

SEQ ID NO: 22418 - protein, 9 aa, Homo sapiens
  AACR GENIE Results; CARD11_p.G540R; A3201
RSLPITNSF

SEQ ID NO: 22419 - protein, 9 aa, Homo sapiens
  AACR GENIE Results; CARD11_p.G540R; A2301
RSLPITNSF

SEQ ID NO: 22420 - protein, 9 aa, Homo sapiens
  AACR GENIE Results; CARD11_p.G540R; B1501
RSLPITNSF

SEQ ID NO: 22421 - protein, 11 aa, Homo sapiens
  AACR GENIE Results; CARD11_p.G540R; A1101
RSLPITNSFTK

SEQ ID NO: 22422 - protein, 11 aa, Homo sapiens
  AACR GENIE Results; CARD11_p.G540R; B5701
RSLPITNSFTK

SEQ ID NO: 22423 - protein, 9 aa, Homo sapiens
  AACR GENIE Results; CARD11_p.G540R; A2402
RSLPITNSF

SEQ ID NO: 22424 - protein, 9 aa, Homo sapiens
  AACR GENIE Results; CASP8_p.R68Q; C1402
LFQINRLDL

SEQ ID NO: 22425 - protein, 9 aa, Homo sapiens
  AACR GENIE Results; CASP8_p.R68Q; C1701
FQINRLDLL

SEQ ID NO: 22426 - protein, 9 aa, Homo sapiens
  AACR GENIE Results; CASP8_p.R68Q; A0201
FQINRLDLL

SEQ ID NO: 22427 - protein, 9 aa, Homo sapiens
  AACR GENIE Results; CASP8_p.R68Q; A0201
FLKELLFQI

SEQ ID NO: 22428 - protein, 9 aa, Homo sapiens
  AACR GENIE Results; CASP8_p.R68Q; C0202
FQINRLDLL

SEQ ID NO: 22429 - protein, 9 aa, Homo sapiens
  AACR GENIE Results; CASP8_p.R68Q; A6802
ELLFQINRL

SEQ ID NO: 22430 - protein, 9 aa, Homo sapiens
  AACR GENIE Results; CASP8_p.R68Q; A6802
FQINRLDLL

SEQ ID NO: 22431 - protein, 8 aa, Homo sapiens
  AACR GENIE Results; CBL_p.P510A; C0304
VASSASAL

SEQ ID NO: 22432 - protein, 8 aa, Homo sapiens
  AACR GENIE Results; CBL_p.P510A; C0303
VASSASAL

SEQ ID NO: 22433 - protein, 9 aa, Homo sapiens
  AACR GENIE Results; CBL_p.P510A; B0702
CVASSASAL

SEQ ID NO: 22434 - protein, 9 aa, Homo sapiens
  AACR GENIE Results; CBL_p.P510A; C0304
CVASSASAL

SEQ ID NO: 22435 - protein, 9 aa, Homo sapiens
  AACR GENIE Results; CBL_p.P510A; B1501
CVASSASAL

SEQ ID NO: 22436 - protein, 9 aa, Homo sapiens
  AACR GENIE Results; CBL_p.P510A; C0303
CVASSASAL

SEQ ID NO: 22437 - protein, 8 aa, Homo sapiens
  AACR GENIE Results; CBL_p.P510A; B1501
VASSASAL

SEQ ID NO: 22438 - protein, 8 aa, Homo sapiens
  AACR GENIE Results; CBL_p.P510A; C0102
VASSASAL

SEQ ID NO: 22439 - protein, 9 aa, Homo sapiens
  AACR GENIE Results; CBL_p.P510A; A0201
LLPQRVCVA

SEQ ID NO: 22440 - protein, 9 aa, Homo sapiens
  AACR GENIE Results; CBL_p.P510A; C0102
CVASSASAL

SEQ ID NO: 22441 - protein, 9 aa, Homo sapiens
  AACR GENIE Results; CCND2_p.A252V; B1801
IEVVLLNSL

SEQ ID NO: 22442 - protein, 9 aa, Homo sapiens
  AACR GENIE Results; CCND2_p.A252V; B4001
IEVVLLNSL

SEQ ID NO: 22443 - protein, 11 aa, Homo sapiens
  AACR GENIE Results; CCND2_p.A252V; A2601
EVVLLNSLQQY

SEQ ID NO: 22444 - protein, 9 aa, Homo sapiens
  AACR GENIE Results; CCND2_p.A252V; B4901
IEVVLLNSL

SEQ ID NO: 22445 - protein, 9 aa, Homo sapiens
  AACR GENIE Results; CCND2_p.A252V; B4001
QEQIEVVLL

SEQ ID NO: 22446 - protein, 9 aa, Homo sapiens
  AACR GENIE Results; CCND2_p.A252V; A3001
IEVVLLNSL

SEQ ID NO: 22447 - protein, 9 aa, Homo sapiens
  AACR GENIE Results; CCND2_p.A252V; B1402
IEVVLLNSL

SEQ ID NO: 22448 - protein, 8 aa, Homo sapiens
  AACR GENIE Results; CCND2_p.A252V; B4001
QEQIEVVL

SEQ ID NO: 22449 - protein, 10 aa, Homo sapiens
  AACR GENIE Results; CCND2_p.A252V; B1501
VVLLNSLQQY

SEQ ID NO: 22450 - protein, 9 aa, Homo sapiens
  AACR GENIE Results; CCND2_p.A252V; B3801
CQEQIEVVL

SEQ ID NO: 22451 - protein, 9 aa, Homo sapiens
  AACR GENIE Results; CCND2_p.A252V; A2301
IEVVLLNSL

SEQ ID NO: 22452 - protein, 11 aa, Homo sapiens
  AACR GENIE Results; CCND2_p.A252V; B3501
EVVLLNSLQQY

SEQ ID NO: 22453 - protein, 11 aa, Homo sapiens
  AACR GENIE Results; CCND2_p.A252V; A6801
EVVLLNSLQQY

SEQ ID NO: 22454 - protein, 9 aa, Homo sapiens
  AACR GENIE Results; CCND2_p.A252V; B4403
IEVVLLNSL

SEQ ID NO: 22455 - protein, 11 aa, Homo sapiens
  AACR GENIE Results; CCND2_p.A252V; A3101
VVLLNSLQQYR

SEQ ID NO: 22456 - protein, 10 aa, Homo sapiens
  AACR GENIE Results; CCND2_p.A252V; A2902
VVLLNSLQQY

SEQ ID NO: 22457 - protein, 11 aa, Homo sapiens
  AACR GENIE Results; CCND2_p.A252V; B3801
EQIEVVLLNSL

SEQ ID NO: 22458 - protein, 9 aa, Homo sapiens
  AACR GENIE Results; CCND2_p.A252V; B4403
QEQIEVVLL

SEQ ID NO: 22459 - protein, 9 aa, Homo sapiens
  AACR GENIE Results; CCND2_p.A252V; B5101
IEVVLLNSL

SEQ ID NO: 22460 - protein, 9 aa, Homo sapiens
  AACR GENIE Results; CCND2_p.A252V; A3001
QEQIEVVLL

SEQ ID NO: 22461 - protein, 8 aa, Homo sapiens
  AACR GENIE Results; CCND2_p.A252V; A2601
EVVLLNSL

SEQ ID NO: 22462 - protein, 8 aa, Homo sapiens
  AACR GENIE Results; CCND2_p.A252V; B1402
EVVLLNSL

SEQ ID NO: 22463 - protein, 9 aa, Homo sapiens
  AACR GENIE Results; CCND2_p.A252V; B4901
QEQIEVVLL

SEQ ID NO: 22464 - protein, 8 aa, Homo sapiens
  AACR GENIE Results; CCND2_p.A252V; B0801
EVVLLNSL

SEQ ID NO: 22465 - protein, 9 aa, Homo sapiens
  AACR GENIE Results; CCND2_p.A252V; B1501
IEVVLLNSL

SEQ ID NO: 22466 - protein, 9 aa, Homo sapiens
  AACR GENIE Results; CCND2_p.A252V; B4402
QEQIEVVLL

SEQ ID NO: 22467 - protein, 8 aa, Homo sapiens
  AACR GENIE Results; CCND2_p.A252V; B5101
EVVLLNSL

SEQ ID NO: 22468 - protein, 9 aa, Homo sapiens
  AACR GENIE Results; CCND2_p.A252V; B3801
IEVVLLNSL

SEQ ID NO: 22469 - protein, 9 aa, Homo sapiens
  AACR GENIE Results; CCND2_p.A252V; B0702
IEVVLLNSL

SEQ ID NO: 22470 - protein, 8 aa, Homo sapiens
  AACR GENIE Results; CCND2_p.A252V; B1801
QEQIEVVL

SEQ ID NO: 22471 - protein, 9 aa, Homo sapiens
  AACR GENIE Results; CCND2_p.A252V; B4402
IEVVLLNSL

SEQ ID NO: 22472 - protein, 9 aa, Homo sapiens
  AACR GENIE Results; CCND2_p.A252V; A0201
ACQEQIEVV

SEQ ID NO: 22473 - protein, 9 aa, Homo sapiens
  AACR GENIE Results; CCND2_p.A252V; B1302
KACQEQIEV

SEQ ID NO: 22474 - protein, 8 aa, Homo sapiens
  AACR GENIE Results; CCND2_p.A252V; B1501
EQIEVVLL

SEQ ID NO: 22475 - protein, 11 aa, Homo sapiens
  AACR GENIE Results; CCND2_p.A252V; B1501
EVVLLNSLQQY

SEQ ID NO: 22476 - protein, 9 aa, Homo sapiens
  AACR GENIE Results; CCND2_p.A252V; C1601
KACQEQIEV

SEQ ID NO: 22477 - protein, 10 aa, Homo sapiens
  AACR GENIE Results; CCND2_p.A252V; A3001
ACQEQIEVVL

SEQ ID NO: 22478 - protein, 9 aa, Homo sapiens
  AACR GENIE Results; CCND2_p.A252V; B3801
QEQIEVVLL

SEQ ID NO: 22479 - protein, 11 aa, Homo sapiens
  AACR GENIE Results; CCND2_p.A252V; B4403
EVVLLNSLQQY

SEQ ID NO: 22480 - protein, 10 aa, Homo sapiens
  AACR GENIE Results; CCND2_p.A252V; B5701
VVLLNSLQQY

SEQ ID NO: 22481 - protein, 9 aa, Homo sapiens
  AACR GENIE Results; CCND2_p.A252V; B1302
IEVVLLNSL

SEQ ID NO: 22482 - protein, 8 aa, Homo sapiens
  AACR GENIE Results; CCND2_p.A252V; B1302
EQIEVVLL

SEQ ID NO: 22483 - protein, 10 aa, Homo sapiens
  AACR GENIE Results; CCND2_p.A252V; B4001
QIEVVLLNSL

SEQ ID NO: 22484 - protein, 9 aa, Homo sapiens
  AACR GENIE Results; CCND2_p.A252V; C1502
KACQEQIEV

SEQ ID NO: 22485 - protein, 9 aa, Homo sapiens
  AACR GENIE Results; CCND2_p.A252V; B1501
CQEQIEVVL

SEQ ID NO: 22486 - protein, 9 aa, Homo sapiens
  AACR GENIE Results; CCND2_p.A252V; B2705
IEVVLLNSL

SEQ ID NO: 22487 - protein, 8 aa, Homo sapiens
  AACR GENIE Results; CCND2_p.A252V; A3001
QEQIEVVL

SEQ ID NO: 22488 - protein, 10 aa, Homo sapiens
  AACR GENIE Results; CCND2_p.A252V; B3501
VVLLNSLQQY

SEQ ID NO: 22489 - protein, 11 aa, Homo sapiens
  AACR GENIE Results; CCND2_p.A252V; A3001
EQIEVVLLNSL

SEQ ID NO: 22490 - protein, 11 aa, Homo sapiens
  AACR GENIE Results; CCND2_p.A252V; B1302
EQIEVVLLNSL

SEQ ID NO: 22491 - protein, 9 aa, Homo sapiens
  AACR GENIE Results; CCND2_p.A252V; B3501
IEVVLLNSL

SEQ ID NO: 22492 - protein, 10 aa, Homo sapiens
  AACR GENIE Results; CCND2_p.A252V; B3801
QIEVVLLNSL

SEQ ID NO: 22493 - protein, 8 aa, Homo sapiens
  AACR GENIE Results; CCND2_p.A252V; B1801
EVVLLNSL

SEQ ID NO: 22494 - protein, 9 aa, Homo sapiens
  AACR GENIE Results; CCND2_p.A252V; C0802
CQEQIEVVL

SEQ ID NO: 22495 - protein, 10 aa, Homo sapiens
  AACR GENIE Results; CCNE1_p.F172L; A0101
YLAQDLFDRY

SEQ ID NO: 22496 - protein, 10 aa, Homo sapiens
  AACR GENIE Results; CCNE1_p.F172L; A2902
YLAQDLFDRY

SEQ ID NO: 22497 - protein, 9 aa, Homo sapiens
  AACR GENIE Results; CCNE1_p.F172L; B2702
YLAQDLFDR

SEQ ID NO: 22498 - protein, 11 aa, Homo sapiens
  AACR GENIE Results; CCNE1_p.F172L; A2902
FYLAQDLFDRY

SEQ ID NO: 22499 - protein, 9 aa, Homo sapiens
  AACR GENIE Results; CCNE1_p.F172L; B3501
LAQDLFDRY

SEQ ID NO: 22500 - protein, 9 aa, Homo sapiens
  AACR GENIE Results; CCNE1_p.F172L; B5701
LAQDLFDRY

SEQ ID NO: 22501 - protein, 9 aa, Homo sapiens
  AACR GENIE Results; CCNE1_p.F172L; A0101
LAQDLFDRY

SEQ ID NO: 22502 - protein, 9 aa, Homo sapiens
  AACR GENIE Results; CCNE1_p.F172L; A2902
LAQDLFDRY

SEQ ID NO: 22503 - protein, 8 aa, Homo sapiens
  AACR GENIE Results; CCNE1_p.F172L; A1101
AQDLFDRY

SEQ ID NO: 22504 - protein, 8 aa, Homo sapiens
  AACR GENIE Results; CDC73_p.R139Q; B4901
AEAKKPQI

SEQ ID NO: 22505 - protein, 8 aa, Homo sapiens
  AACR GENIE Results; CDC73_p.R139Q; B4002
AEAKKPQI

SEQ ID NO: 22506 - protein, 8 aa, Homo sapiens
  AACR GENIE Results; CDC73_p.R139Q; B4403
AEAKKPQI

SEQ ID NO: 22507 - protein, 8 aa, Homo sapiens
  AACR GENIE Results; CDC73_p.R91Q; B1501
DQKDLLGY

SEQ ID NO: 22508 - protein, 8 aa, Homo sapiens
  AACR GENIE Results; CDC73_p.R91Q; B0702
RPDQKDLL

SEQ ID NO: 22509 - protein, 10 aa, Homo sapiens
  AACR GENIE Results; CDK4_p.R24L; A0201
ALDPHSGHFV

SEQ ID NO: 22510 - protein, 9 aa, Homo sapiens
  AACR GENIE Results; CDK4_p.R24L; C0501
ALDPHSGHF

SEQ ID NO: 22511 - protein, 10 aa, Homo sapiens
  AACR GENIE Results; CDK4_p.R24L; B1302
ALDPHSGHFV

SEQ ID NO: 22512 - protein, 9 aa, Homo sapiens
  AACR GENIE Results; CDK4_p.R24L; C0802
ALDPHSGHF

SEQ ID NO: 22513 - protein, 10 aa, Homo sapiens
  AACR GENIE Results; CDK4_p.R24L; B5701
KALDPHSGHF

SEQ ID NO: 22514 - protein, 9 aa, Homo sapiens
  AACR GENIE Results; CDK4_p.R24L; B3801
ALDPHSGHF

SEQ ID NO: 22515 - protein, 11 aa, Homo sapiens
  AACR GENIE Results; CDK4_p.R24L; A0201
ALDPHSGHFVA

SEQ ID NO: 22516 - protein, 9 aa, Homo sapiens
  AACR GENIE Results; CDK4_p.R24L; A2301
AYGTVYKAL

SEQ ID NO: 22517 - protein, 9 aa, Homo sapiens
  AACR GENIE Results; CDK4_p.R24L; A0101
ALDPHSGHF

SEQ ID NO: 22518 - protein, 9 aa, Homo sapiens
  AACR GENIE Results; CDK4_p.R24L; A2402
AYGTVYKAL

SEQ ID NO: 22519 - protein, 9 aa, Homo sapiens
  AACR GENIE Results; CDK4_p.R24L; B1501
ALDPHSGHF

SEQ ID NO: 22520 - protein, 10 aa, Homo sapiens
  AACR GENIE Results; CDK4_p.R24L; C0501
ALDPHSGHFV

SEQ ID NO: 22521 - protein, 10 aa, Homo sapiens
  AACR GENIE Results; CDK4_p.R24L; C0304
KALDPHSGHF

SEQ ID NO: 22522 - protein, 10 aa, Homo sapiens
  AACR GENIE Results; CDK4_p.R24L; A0301
ALDPHSGHFV

SEQ ID NO: 22523 - protein, 10 aa, Homo sapiens
  AACR GENIE Results; CDK4_p.R24L; A0301
KALDPHSGHF

SEQ ID NO: 22524 - protein, 10 aa, Homo sapiens
  AACR GENIE Results; CDKN1B_p.S10Afs*32; B0702
SPRPAGTSSA

SEQ ID NO: 22525 - protein, 9 aa, Homo sapiens
  AACR GENIE Results; CDKN1B_p.S10Afs*32; B0702
SPRPAGTSS

SEQ ID NO: 22526 - protein, 10 aa, Homo sapiens
  AACR GENIE Results; CDKN1B_p.S10Afs*32; A1101
GTSSARWTTK

SEQ ID NO: 22527 - protein, 10 aa, Homo sapiens
  AACR GENIE Results; CDKN1B_p.S10Afs*32; A0301
GTSSARWTTK

SEQ ID NO: 22528 - protein, 10 aa, Homo sapiens
  AACR GENIE Results; CDKN2A_p.A102E; B4403
GERLDVRDAW

SEQ ID NO: 22529 - protein, 9 aa, Homo sapiens
  AACR GENIE Results; CDKN2A_p.A102E; C0602
HRAGERLDV

SEQ ID NO: 22530 - protein, 10 aa, Homo sapiens
  AACR GENIE Results; CDKN2A_p.A102E; B4402
GERLDVRDAW

SEQ ID NO: 22531 - protein, 9 aa, Homo sapiens
  AACR GENIE Results; CDKN2A_p.A102V; C0602
HRAGVRLDV

SEQ ID NO: 22532 - protein, 8 aa, Homo sapiens
  AACR GENIE Results; CDKN2A_p.A102V; C1601
RAGVRLDV

SEQ ID NO: 22533 - protein, 9 aa, Homo sapiens
  AACR GENIE Results; CDKN2A_p.A76Pfs*70; C0102
LSPDPCTTL

SEQ ID NO: 22534 - protein, 8 aa, Homo sapiens
  AACR GENIE Results; CDKN2A_p.A76Pfs*70; A1101
PEAVTMPA

SEQ ID NO: 22535 - protein, 11 aa, Homo sapiens
  AACR GENIE Results; CDKN2A_p.A76Pfs*70; B1501
RLRGAPEAVTM

SEQ ID NO: 22536 - protein, 9 aa, Homo sapiens
  AACR GENIE Results; CDKN2A_p.A76Pfs*70; B1501
RGAPEAVTM

SEQ ID NO: 22537 - protein, 9 aa, Homo sapiens
  AACR GENIE Results; CDKN2A_p.A76Pfs*70; A0301
RSWAIAMSH

SEQ ID NO: 22538 - protein, 9 aa, Homo sapiens
  AACR GENIE Results; CDKN2A_p.A76Pfs*70; B0702
IAMSHGTCA

SEQ ID NO: 22539 - protein, 9 aa, Homo sapiens
  AACR GENIE Results; CDKN2A_p.A76Pfs*70; B3501
RGAPEAVTM

SEQ ID NO: 22540 - protein, 9 aa, Homo sapiens
  AACR GENIE Results; CDKN2A_p.A76Pfs*70; A0201
RLRGAPEAV

SEQ ID NO: 22541 - protein, 8 aa, Homo sapiens
  AACR GENIE Results; CDKN2A_p.A76Pfs*70; B5101
GAPEAVTM

SEQ ID NO: 22542 - protein, 9 aa, Homo sapiens
  AACR GENIE Results; CDKN2A_p.A76Pfs*70; B0702
APEAVTMPA

SEQ ID NO: 22543 - protein, 8 aa, Homo sapiens
  AACR GENIE Results; CDKN2A_p.A76Pfs*70; C0102
GAPEAVTM

SEQ ID NO: 22544 - protein, 9 aa, Homo sapiens
  AACR GENIE Results; CDKN2A_p.A76Pfs*70; B3501
APEAVTMPA

SEQ ID NO: 22545 - protein, 9 aa, Homo sapiens
  AACR GENIE Results; CDKN2A_p.A76Pfs*70; B0702
RGAPEAVTM

SEQ ID NO: 22546 - protein, 8 aa, Homo sapiens
  AACR GENIE Results; CDKN2A_p.A76Pfs*70; B3501
MPGAVCPW

SEQ ID NO: 22547 - protein, 10 aa, Homo sapiens
  AACR GENIE Results; CDKN2A_p.A76Pfs*70; A1101
GAPEAVTMPA

SEQ ID NO: 22548 - protein, 9 aa, Homo sapiens
  AACR GENIE Results; CDKN2A_p.A76Pfs*70; C0304
IAMSHGTCA

SEQ ID NO: 22549 - protein, 11 aa, Homo sapiens
  AACR GENIE Results; CDKN2A_p.A76Pfs*70; A1101
RGAPEAVTMPA

SEQ ID NO: 22550 - protein, 9 aa, Homo sapiens
  AACR GENIE Results; CDKN2A_p.D108H; B4403
ARLDVRHAW

SEQ ID NO: 22551 - protein, 9 aa, Homo sapiens
  AACR GENIE Results; CDKN2A_p.D108N; B4403
ARLDVRNAW

SEQ ID NO: 22552 - protein, 9 aa, Homo sapiens
  AACR GENIE Results; CDKN2A_p.D108Y; B1501
AGARLDVRY

SEQ ID NO: 22553 - protein, 9 aa, Homo sapiens
  AACR GENIE Results; CDKN2A_p.D74G; B0702
GPATLTRPV

SEQ ID NO: 22554 - protein, 9 aa, Homo sapiens
  AACR GENIE Results; CDKN2A_p.D74G; A1101
CAGPATLTR

SEQ ID NO: 22555 - protein, 9 aa, Homo sapiens
  AACR GENIE Results; CDKN2A_p.D74G; B0801
GPATLTRPV

SEQ ID NO: 22556 - protein, 9 aa, Homo sapiens
  AACR GENIE Results; CDKN2A_p.D74Y; B3501
HGAEPNCAY

SEQ ID NO: 22557 - protein, 9 aa, Homo sapiens
  AACR GENIE Results; CDKN2A_p.D74Y; B1501
HGAEPNCAY

SEQ ID NO: 22558 - protein, 9 aa, Homo sapiens
  AACR GENIE Results; CDKN2A_p.D74Y; B5101
YPATLTRPV

SEQ ID NO: 22559 - protein, 11 aa, Homo sapiens
  AACR GENIE Results; CDKN2A_p.D74Y; B4001
AEPNCAYPATL

SEQ ID NO: 22560 - protein, 9 aa, Homo sapiens
  AACR GENIE Results; CDKN2A_p.D74Y; A1101
CAYPATLTR

SEQ ID NO: 22561 - protein, 9 aa, Homo sapiens
  AACR GENIE Results; CDKN2A_p.D74Y; A0301
CAYPATLTR

SEQ ID NO: 22562 - protein, 9 aa, Homo sapiens
  AACR GENIE Results; CDKN2A_p.D74Y; B0702
YPATLTRPV

SEQ ID NO: 22563 - protein, 9 aa, Homo sapiens
  AACR GENIE Results; CDKN2A_p.D74Y; B0801
YPATLTRPV

SEQ ID NO: 22564 - protein, 9 aa, Homo sapiens
  AACR GENIE Results; CDKN2A_p.D74Y; B3501
YPATLTRPV

SEQ ID NO: 22565 - protein, 9 aa, Homo sapiens
  AACR GENIE Results; CDKN2A_p.D74Y; C1203
CAYPATLTR

SEQ ID NO: 22566 - protein, 11 aa, Homo sapiens
  AACR GENIE Results; CDKN2A_p.D84G; B0702
RPVHGAAREGF

SEQ ID NO: 22567 - protein, 11 aa, Homo sapiens
  AACR GENIE Results; CDKN2A_p.D84N; B0702
RPVHNAAREGF

SEQ ID NO: 22568 - protein, 9 aa, Homo sapiens
  AACR GENIE Results; CDKN2A_p.D84N; B0702
LTRPVHNAA

SEQ ID NO: 22569 - protein, 9 aa, Homo sapiens
  AACR GENIE Results; CDKN2A_p.D84V; C1502
ATLTRPVHV

SEQ ID NO: 22570 - protein, 9 aa, Homo sapiens
  AACR GENIE Results; CDKN2A_p.D84V; B3801
VHVAAREGF

SEQ ID NO: 22571 - protein, 10 aa, Homo sapiens
  AACR GENIE Results; CDKN2A_p.D84V; A3101
LTRPVHVAAR

SEQ ID NO: 22572 - protein, 9 aa, Homo sapiens
  AACR GENIE Results; CDKN2A_p.D84V; A0201
ATLTRPVHV

SEQ ID NO: 22573 - protein, 9 aa, Homo sapiens
  AACR GENIE Results; CDKN2A_p.D84V; A3001
LTRPVHVAA

SEQ ID NO: 22574 - protein, 8 aa, Homo sapiens
  AACR GENIE Results; CDKN2A_p.D84V; C1701
VAAREGFL

SEQ ID NO: 22575 - protein, 11 aa, Homo sapiens
  AACR GENIE Results; CDKN2A_p.D84V; A3101
ATLTRPVHVAA

SEQ ID NO: 22576 - protein, 9 aa, Homo sapiens
  AACR GENIE Results; CDKN2A_p.D84V; B2705
TRPVHVAAR

SEQ ID NO: 22577 - protein, 9 aa, Homo sapiens
  AACR GENIE Results; CDKN2A_p.D84V; B0702
LTRPVHVAA

SEQ ID NO: 22578 - protein, 9 aa, Homo sapiens
  AACR GENIE Results; CDKN2A_p.D84Y; C1601
ATLTRPVHY

SEQ ID NO: 22579 - protein, 9 aa, Homo sapiens
  AACR GENIE Results; CDKN2A_p.D84Y; A2902
ATLTRPVHY

SEQ ID NO: 22580 - protein, 9 aa, Homo sapiens
  AACR GENIE Results; CDKN2A_p.D84Y; B5701
ATLTRPVHY

SEQ ID NO: 22581 - protein, 9 aa, Homo sapiens
  AACR GENIE Results; CDKN2A_p.D84Y; A1101
ATLTRPVHY

SEQ ID NO: 22582 - protein, 9 aa, Homo sapiens
  AACR GENIE Results; CDKN2A_p.D84Y; A0301
ATLTRPVHY

SEQ ID NO: 22583 - protein, 10 aa, Homo sapiens
  AACR GENIE Results; CDKN2A_p.D84Y; A3101
LTRPVHYAAR

SEQ ID NO: 22584 - protein, 11 aa, Homo sapiens
  AACR GENIE Results; CDKN2A_p.D84Y; B1801
DPATLTRPVHY

SEQ ID NO: 22585 - protein, 11 aa, Homo sapiens
  AACR GENIE Results; CDKN2A_p.D84Y; B3501
DPATLTRPVHY

SEQ ID NO: 22586 - protein, 9 aa, Homo sapiens
  AACR GENIE Results; CDKN2A_p.D84Y; B1501
ATLTRPVHY

SEQ ID NO: 22587 - protein, 9 aa, Homo sapiens
  AACR GENIE Results; CDKN2A_p.D84Y; C1203
ATLTRPVHY

SEQ ID NO: 22588 - protein, 9 aa, Homo sapiens
  AACR GENIE Results; CDKN2A_p.D84Y; A3201
ATLTRPVHY

SEQ ID NO: 22589 - protein, 10 aa, Homo sapiens
  AACR GENIE Results; CDKN2A_p.E69G; A0201
LLLHGAGPNC

SEQ ID NO: 22590 - protein, 9 aa, Homo sapiens
  AACR GENIE Results; CDKN2A_p.G55C; B0801
MCSARVAEL

SEQ ID NO: 22591 - protein, 9 aa, Homo sapiens
  AACR GENIE Results; CDKN2A_p.G55C; B0702
MCSARVAEL

SEQ ID NO: 22592 - protein, 9 aa, Homo sapiens
  AACR GENIE Results; CDKN2A_p.G55V; B0702
MVSARVAEL

SEQ ID NO: 22593 - protein, 9 aa, Homo sapiens
  AACR GENIE Results; CDKN2A_p.G55V; B0801
MVSARVAEL

SEQ ID NO: 22594 - protein, 9 aa, Homo sapiens
  AACR GENIE Results; CDKN2A_p.G55V; C0304
MVSARVAEL

SEQ ID NO: 22595 - protein, 10 aa, Homo sapiens
  AACR GENIE Results; CDKN2A_p.G55V; B0801
MMVSARVAEL

SEQ ID NO: 22596 - protein, 9 aa, Homo sapiens
  AACR GENIE Results; CDKN2A_p.G55V; A0301
MVSARVAEL

SEQ ID NO: 22597 - protein, 8 aa, Homo sapiens
  AACR GENIE Results; CDKN2A_p.G55V; C0304
VSARVAEL

SEQ ID NO: 22598 - protein, 9 aa, Homo sapiens
  AACR GENIE Results; CDKN2A_p.G55V; A0201
MVSARVAEL

SEQ ID NO: 22599 - protein, 9 aa, Homo sapiens
  AACR GENIE Results; CDKN2A_p.G55V; A0201
VMMMVSARV

SEQ ID NO: 22600 - protein, 11 aa, Homo sapiens
  AACR GENIE Results; CDKN2A_p.H83D; B0702
RPVDDAAREGF

SEQ ID NO: 22601 - protein, 11 aa, Homo sapiens
  AACR GENIE Results; CDKN2A_p.H83D; B3501
RPVDDAAREGF

SEQ ID NO: 22602 - protein, 10 aa, Homo sapiens
  AACR GENIE Results; CDKN2A_p.H83R; A6801
DPATLTRPVR

SEQ ID NO: 22603 - protein, 9 aa, Homo sapiens
  AACR GENIE Results; CDKN2A_p.H83Y; C0401
VYDAAREGF

SEQ ID NO: 22604 - protein, 8 aa, Homo sapiens
  AACR GENIE Results; CDKN2A_p.H83Y; B3701
YDAAREGF

SEQ ID NO: 22605 - protein, 10 aa, Homo sapiens
  AACR GENIE Results; CDKN2A_p.H83Y; B3501
DPATLTRPVY

SEQ ID NO: 22606 - protein, 9 aa, Homo sapiens
  AACR GENIE Results; CDKN2A_p.H83Y; A2402
VYDAAREGF

SEQ ID NO: 22607 - protein, 8 aa, Homo sapiens
  AACR GENIE Results; CDKN2A_p.H83Y; C1601
ATLTRPVY

SEQ ID NO: 22608 - protein, 10 aa, Homo sapiens
  AACR GENIE Results; CDKN2A_p.H83Y; A2601
DPATLTRPVY

SEQ ID NO: 22609 - protein, 9 aa, Homo sapiens
  AACR GENIE Results; CDKN2A_p.H83Y; A2301
VYDAAREGF

SEQ ID NO: 22610 - protein, 9 aa, Homo sapiens
  AACR GENIE Results; CDKN2A_p.H83Y; A3001
LTRPVYDAA

SEQ ID NO: 22611 - protein, 10 aa, Homo sapiens
  AACR GENIE Results; CDKN2A_p.H83Y; B3508
DPATLTRPVY

SEQ ID NO: 22612 - protein, 9 aa, Homo sapiens
  AACR GENIE Results; CDKN2A_p.H83Y; A0205
LTRPVYDAA

SEQ ID NO: 22613 - protein, 10 aa, Homo sapiens
  AACR GENIE Results; CDKN2A_p.H83Y; A2501
DPATLTRPVY

SEQ ID NO: 22614 - protein, 10 aa, Homo sapiens
  AACR GENIE Results; CDKN2A_p.H83Y; C0401
VYDAAREGFL

SEQ ID NO: 22615 - protein, 10 aa, Homo sapiens
  AACR GENIE Results; CDKN2A_p.H83Y; A3101
LTRPVYDAAR

SEQ ID NO: 22616 - protein, 9 aa, Homo sapiens
  AACR GENIE Results; CDKN2A_p.H83Y; C1402
VYDAAREGF

SEQ ID NO: 22617 - protein, 9 aa, Homo sapiens
  AACR GENIE Results; CDKN2A_p.H83Y; C0302
LTRPVYDAA

SEQ ID NO: 22618 - protein, 9 aa, Homo sapiens
  AACR GENIE Results; CDKN2A_p.H83Y; C1601
PATLTRPVY

SEQ ID NO: 22619 - protein, 8 aa, Homo sapiens
  AACR GENIE Results; CDKN2A_p.H83Y; B3906
TRPVYDAA

SEQ ID NO: 22620 - protein, 8 aa, Homo sapiens
  AACR GENIE Results; CDKN2A_p.L104Cfs*11; B0702
GPSARGPG

SEQ ID NO: 22621 - protein, 11 aa, Homo sapiens
  AACR GENIE Results; CDKN2A_p.L16Pfs*9; A1101
SSMEPSADWPR

SEQ ID NO: 22622 - protein, 11 aa, Homo sapiens
  AACR GENIE Results; CDKN2A_p.L16Pfs*9; A6801
SSMEPSADWPR

SEQ ID NO: 22623 - protein, 11 aa, Homo sapiens
  AACR GENIE Results; CDKN2A_p.L16Pfs*9; B2702
SSMEPSADWPR

SEQ ID NO: 22624 - protein, 10 aa, Homo sapiens
  AACR GENIE Results; CDKN2A_p.L32_L37del; B5801
RALPNAPNSY

SEQ ID NO: 22625 - protein, 10 aa, Homo sapiens
  AACR GENIE Results; CDKN2A_p.L32_L37del; A3002
RALPNAPNSY

SEQ ID NO: 22626 - protein, 10 aa, Homo sapiens
  AACR GENIE Results; CDKN2A_p.L32_L37del; B5701
RALPNAPNSY

SEQ ID NO: 22627 - protein, 10 aa, Homo sapiens
  AACR GENIE Results; CDKN2A_p.L32_L37del; B1501
RALPNAPNSY

SEQ ID NO: 22628 - protein, 10 aa, Homo sapiens
  AACR GENIE Results; CDKN2A_p.L32_L37del; B3501
RALPNAPNSY

SEQ ID NO: 22629 - protein, 11 aa, Homo sapiens
  AACR GENIE Results; CDKN2A_p.L32_L37del; B3901
VRALPNAPNSY

SEQ ID NO: 22630 - protein, 9 aa, Homo sapiens
  AACR GENIE Results; CDKN2A_p.L32_L37del; B5001
EEVRALPNA

SEQ ID NO: 22631 - protein, 10 aa, Homo sapiens
  AACR GENIE Results; CDKN2A_p.L32_L37del; A2902
RALPNAPNSY

SEQ ID NO: 22632 - protein, 10 aa, Homo sapiens
  AACR GENIE Results; CDKN2A_p.L32_L37del; B3901
RALPNAPNSY

SEQ ID NO: 22633 - protein, 11 aa, Homo sapiens
  AACR GENIE Results; CDKN2A_p.L32_L37del; B2702
VRALPNAPNSY

SEQ ID NO: 22634 - protein, 10 aa, Homo sapiens
  AACR GENIE Results; CDKN2A_p.L32_L37del; C1601
RALPNAPNSY

SEQ ID NO: 22635 - protein, 10 aa, Homo sapiens
  AACR GENIE Results; CDKN2A_p.L32_L37del; B2702
RALPNAPNSY

SEQ ID NO: 22636 - protein, 10 aa, Homo sapiens
  AACR GENIE Results; CDKN2A_p.L32_L37del; A3201
RALPNAPNSY

SEQ ID NO: 22637 - protein, 10 aa, Homo sapiens
  AACR GENIE Results; CDKN2A_p.L32_L37del; A3303
EVRALPNAPN

SEQ ID NO: 22638 - protein, 9 aa, Homo sapiens
  AACR GENIE Results; CDKN2A_p.L32_L37del; B4002
EEVRALPNA

SEQ ID NO: 22639 - protein, 10 aa, Homo sapiens
  AACR GENIE Results; CDKN2A_p.L32_L37del; A2301
RALPNAPNSY

SEQ ID NO: 22640 - protein, 9 aa, Homo sapiens
  AACR GENIE Results; CDKN2A_p.L32_L37del; A3303
EVRALPNAP

SEQ ID NO: 22641 - protein, 10 aa, Homo sapiens
  AACR GENIE Results; CDKN2A_p.L32_L37del; C0202
RALPNAPNSY

SEQ ID NO: 22642 - protein, 11 aa, Homo sapiens
  AACR GENIE Results; CDKN2A_p.L32Q; A0201
ALQEAGALPNA

SEQ ID NO: 22643 - protein, 9 aa, Homo sapiens
  AACR GENIE Results; CDKN2A_p.L32Q; A3001
QEAGALPNA

SEQ ID NO: 22644 - protein, 10 aa, Homo sapiens
  AACR GENIE Results; CDKN2A_p.L32Q; A3001
QEAGALPNAP

SEQ ID NO: 22645 - protein, 9 aa, Homo sapiens
  AACR GENIE Results; CDKN2A_p.L32Q; B0702
RALQEAGAL

SEQ ID NO: 22646 - protein, 10 aa, Homo sapiens
  AACR GENIE Results; CDKN2A_p.L32Q; A0201
LQEAGALPNA

SEQ ID NO: 22647 - protein, 9 aa, Homo sapiens
  AACR GENIE Results; CDKN2A_p.L32Q; B4403
QEAGALPNA

SEQ ID NO: 22648 - protein, 9 aa, Homo sapiens
  AACR GENIE Results; CDKN2A_p.L62P; A0301
RVAEPLLLH

SEQ ID NO: 22649 - protein, 9 aa, Homo sapiens
  AACR GENIE Results; CDKN2A_p.L62P; A1101
RVAEPLLLH

SEQ ID NO: 22650 - protein, 9 aa, Homo sapiens
  AACR GENIE Results; CDKN2A_p.L62P; C0602
ARVAEPLLL

SEQ ID NO: 22651 - protein, 9 aa, Homo sapiens
  AACR GENIE Results; CDKN2A_p.L62P; B0702
SARVAEPLL

SEQ ID NO: 22652 - protein, 9 aa, Homo sapiens
  AACR GENIE Results; CDKN2A_p.L62P; C1203
SARVAEPLL

SEQ ID NO: 22653 - protein, 9 aa, Homo sapiens
  AACR GENIE Results; CDKN2A_p.L62P; B5101
SARVAEPLL

SEQ ID NO: 22654 - protein, 9 aa, Homo sapiens
  AACR GENIE Results; CDKN2A_p.L62P; A0201
MGSARVAEP

SEQ ID NO: 22655 - protein, 10 aa, Homo sapiens
  AACR GENIE Results; CDKN2A_p.L62P; A0301
RVAEPLLLHG

SEQ ID NO: 22656 - protein, 11 aa, Homo sapiens
  AACR GENIE Results; CDKN2A_p.L62P; A0301
MMGSARVAEPL

SEQ ID NO: 22657 - protein, 9 aa, Homo sapiens
  AACR GENIE Results; CDKN2A_p.L62P; B1501
RVAEPLLLH

SEQ ID NO: 22658 - protein, 9 aa, Homo sapiens
  AACR GENIE Results; CDKN2A_p.L62P; C0202
SARVAEPLL

SEQ ID NO: 22659 - protein, 9 aa, Homo sapiens
  AACR GENIE Results; CDKN2A_p.L62P; C0701
ARVAEPLLL

SEQ ID NO: 22660 - protein, 8 aa, Homo sapiens
  AACR GENIE Results; CDKN2A_p.L78Hfs*41; A3301
DPATHPTR

SEQ ID NO: 22661 - protein, 9 aa, Homo sapiens
  AACR GENIE Results; CDKN2A_p.L78Hfs*41; A6801
HAGGAAPGR

SEQ ID NO: 22662 - protein, 8 aa, Homo sapiens
  AACR GENIE Results; CDKN2A_p.L78Hfs*41; B5101
DPATHPTR

SEQ ID NO: 22663 - protein, 9 aa, Homo sapiens
  AACR GENIE Results; CDKN2A_p.L78Hfs*41; B0702
GAAPGRGAA

SEQ ID NO: 22664 - protein, 9 aa, Homo sapiens
  AACR GENIE Results; CDKN2A_p.L78Hfs*41; A0205
GGAAPGRGA

SEQ ID NO: 22665 - protein, 9 aa, Homo sapiens
  AACR GENIE Results; CDKN2A_p.L78Hfs*41; A3303
PATHPTRAR

SEQ ID NO: 22666 - protein, 8 aa, Homo sapiens
  AACR GENIE Results; CDKN2A_p.L78Hfs*41; A6801
DPATHPTR

SEQ ID NO: 22667 - protein, 8 aa, Homo sapiens
  AACR GENIE Results; CDKN2A_p.L78Hfs*41; A3303
DPATHPTR

SEQ ID NO: 22668 - protein, 9 aa, Homo sapiens
  AACR GENIE Results; CDKN2A_p.L78Hfs*41; B5101
DPATHPTRA

SEQ ID NO: 22669 - protein, 10 aa, Homo sapiens
  AACR GENIE Results; CDKN2A_p.L78Hfs*41; A0301
CLGPSARGPG

SEQ ID NO: 22670 - protein, 8 aa, Homo sapiens
  AACR GENIE Results; CDKN2A_p.L78Hfs*41; B3501
DPATHPTR

SEQ ID NO: 22671 - protein, 9 aa, Homo sapiens
  AACR GENIE Results; CDKN2A_p.L78Hfs*41; A3301
PATHPTRAR

SEQ ID NO: 22672 - protein, 9 aa, Homo sapiens
  AACR GENIE Results; CDKN2A_p.M53I; C0602
RRPIQVMIM

SEQ ID NO: 22673 - protein, 9 aa, Homo sapiens
  AACR GENIE Results; CDKN2A_p.M53I; C0702
RRPIQVMIM

SEQ ID NO: 22674 - protein, 9 aa, Homo sapiens
  AACR GENIE Results; CDKN2A_p.M53I; A3101
QVMIMGSAR

SEQ ID NO: 22675 - protein, 9 aa, Homo sapiens
  AACR GENIE Results; CDKN2A_p.M53I; C0701
RRPIQVMIM

SEQ ID NO: 22676 - protein, 9 aa, Homo sapiens
  AACR GENIE Results; CDKN2A_p.M53I; B1302
VMIMGSARV

SEQ ID NO: 22677 - protein, 9 aa, Homo sapiens
  AACR GENIE Results; CDKN2A_p.M53I; A6801
QVMIMGSAR

SEQ ID NO: 22678 - protein, 8 aa, Homo sapiens
  AACR GENIE Results; CDKN2A_p.M53I; B0702
RPIQVMIM

SEQ ID NO: 22679 - protein, 9 aa, Homo sapiens
  AACR GENIE Results; CDKN2A_p.M53I; B1302
IQVMIMGSA

SEQ ID NO: 22680 - protein, 10 aa, Homo sapiens
  AACR GENIE Results; CDKN2A_p.M54del; B5502
RPIQVMMGSA

SEQ ID NO: 22681 - protein, 10 aa, Homo sapiens
  AACR GENIE Results; CDKN2A_p.M54del; B5501
RPIQVMMGSA

SEQ ID NO: 22682 - protein, 8 aa, Homo sapiens
  AACR GENIE Results; CDKN2A_p.M54del; B3906
IQVMMGSA

SEQ ID NO: 22683 - protein, 9 aa, Homo sapiens
  AACR GENIE Results; CDKN2A_p.M54del; A0205
QVMMGSARV

SEQ ID NO: 22684 - protein, 9 aa, Homo sapiens
  AACR GENIE Results; CDKN2A_p.M54del; A0206
QVMMGSARV

SEQ ID NO: 22685 - protein, 11 aa, Homo sapiens
  AACR GENIE Results; CDKN2A_p.M54del; A0201
VMMGSARVAEL

SEQ ID NO: 22686 - protein, 9 aa, Homo sapiens
  AACR GENIE Results; CDKN2A_p.M54del; A6802
QVMMGSARV

SEQ ID NO: 22687 - protein, 9 aa, Homo sapiens
  AACR GENIE Results; CDKN2A_p.M54del; B1302
QVMMGSARV

SEQ ID NO: 22688 - protein, 8 aa, Homo sapiens
  AACR GENIE Results; CDKN2A_p.P114L; C0501
LVDLAEEL

SEQ ID NO: 22689 - protein, 9 aa, Homo sapiens
  AACR GENIE Results; CDKN2A_p.P114L; A0201
LLVDLAEEL

SEQ ID NO: 22690 - protein, 9 aa, Homo sapiens
  AACR GENIE Results; CDKN2A_p.P114L; C0602
VRDAWGRLL

SEQ ID NO: 22691 - protein, 8 aa, Homo sapiens
  AACR GENIE Results; CDKN2A_p.P114L; C0401
LVDLAEEL

SEQ ID NO: 22692 - protein, 9 aa, Homo sapiens
  AACR GENIE Results; CDKN2A_p.Q50H; C0602
RRPIHVMMM

SEQ ID NO: 22693 - protein, 9 aa, Homo sapiens
  AACR GENIE Results; CDKN2A_p.Q50H; C0701
RRPIHVMMM

SEQ ID NO: 22694 - protein, 8 aa, Homo sapiens
  AACR GENIE Results; CDKN2A_p.Q50H; C0602
GRRPIHVM

SEQ ID NO: 22695 - protein, 9 aa, Homo sapiens
  AACR GENIE Results; CDKN2A_p.Q50H; C0702
RRPIHVMMM

SEQ ID NO: 22696 - protein, 8 aa, Homo sapiens
  AACR GENIE Results; CDKN2A_p.Q50H; B0702
RPIHVMMM

SEQ ID NO: 22697 - protein, 9 aa, Homo sapiens
  AACR GENIE Results; CDKN2A_p.R131P; B5101
LPAAAGGTR

SEQ ID NO: 22698 - protein, 9 aa, Homo sapiens
  AACR GENIE Results; CDKN2A_p.R131P; A2601
DVARYLPAA

SEQ ID NO: 22699 - protein, 11 aa, Homo sapiens
  AACR GENIE Results; CDKN2A_p.R87P; B3501
DAAPEGFLDTL

SEQ ID NO: 22700 - protein, 10 aa, Homo sapiens
  AACR GENIE Results; CDKN2A_p.R87P; C0102
AAPEGFLDTL

SEQ ID NO: 22701 - protein, 9 aa, Homo sapiens
  AACR GENIE Results; CDKN2A_p.R87P; B3501
APEGFLDTL

SEQ ID NO: 22702 - protein, 9 aa, Homo sapiens
  AACR GENIE Results; CDKN2A_p.R87P; B0702
APEGFLDTL

SEQ ID NO: 22703 - protein, 9 aa, Homo sapiens
  AACR GENIE Results; CDKN2A_p.T18_A19dup; A6801
LATATAAAR

SEQ ID NO: 22704 - protein, 9 aa, Homo sapiens
  AACR GENIE Results; CDKN2A_p.T18_A19dup; B2702
LATATAAAR

SEQ ID NO: 22705 - protein, 8 aa, Homo sapiens
  AACR GENIE Results; CDKN2A_p.T18_A19dup; B4002
ADWLATAT

SEQ ID NO: 22706 - protein, 9 aa, Homo sapiens
  AACR GENIE Results; CDKN2A_p.T18_A19dup; A0203
WLATATAAA

SEQ ID NO: 22707 - protein, 9 aa, Homo sapiens
  AACR GENIE Results; CDKN2A_p.T18_A19dup; B4002
ADWLATATA

SEQ ID NO: 22708 - protein, 9 aa, Homo sapiens
  AACR GENIE Results; CDKN2A_p.T18_A19dup; A6801
TATAAARGR

SEQ ID NO: 22709 - protein, 9 aa, Homo sapiens
  AACR GENIE Results; CDKN2A_p.T18_A19dup; B3906
ADWLATATA

SEQ ID NO: 22710 - protein, 9 aa, Homo sapiens
  AACR GENIE Results; CDKN2A_p.T18_A19dup; B3501
LATATAAAR

SEQ ID NO: 22711 - protein, 9 aa, Homo sapiens
  AACR GENIE Results; CDKN2A_p.T18_A19dup; B5001
ADWLATATA

SEQ ID NO: 22712 - protein, 10 aa, Homo sapiens
  AACR GENIE Results; CDKN2A_p.T18_A19dup; A1101
ATATAAARGR

SEQ ID NO: 22713 - protein, 10 aa, Homo sapiens
  AACR GENIE Results; CDKN2A_p.T18_A19dup; A6801
ATATAAARGR

SEQ ID NO: 22714 - protein, 9 aa, Homo sapiens
  AACR GENIE Results; CDKN2A_p.T18_A19dup; B3906
WLATATAAA

SEQ ID NO: 22715 - protein, 9 aa, Homo sapiens
  AACR GENIE Results; CHEK2_p.P484L; B4403
TEEALRHLW

SEQ ID NO: 22716 - protein, 9 aa, Homo sapiens
  AACR GENIE Results; CHEK2_p.P484L; B4402
TEEALRHLW

SEQ ID NO: 22717 - protein, 10 aa, Homo sapiens
  AACR GENIE Results; CHEK2_p.R519G; A0301
VLAQPSTSGK

SEQ ID NO: 22718 - protein, 11 aa, Homo sapiens
  AACR GENIE Results; CHEK2_p.R519G; A0301
QVLAQPSTSGK

SEQ ID NO: 22719 - protein, 10 aa, Homo sapiens
  AACR GENIE Results; CIITA_p.E26D; A1101
ATMDLGPLEG

SEQ ID NO: 22720 - protein, 9 aa, Homo sapiens
  AACR GENIE Results; CIITA_p.E26D; A2601
DLGPLEGGY

SEQ ID NO: 22721 - protein, 11 aa, Homo sapiens
  AACR GENIE Results; CIITA_p.E26D; A0101
TMDLGPLEGGY

SEQ ID NO: 22722 - protein, 10 aa, Homo sapiens
  AACR GENIE Results; CIITA_p.E26D; B2702
MDLGPLEGGY

SEQ ID NO: 22723 - protein, 10 aa, Homo sapiens
  AACR GENIE Results; CIITA_p.R548Q; B0702
QPRGRLVQSL

SEQ ID NO: 22724 - protein, 11 aa, Homo sapiens
  AACR GENIE Results; CIITA_p.R548Q; B1501
AQPRGRLVQSL

SEQ ID NO: 22725 - protein, 10 aa, Homo sapiens
  AACR GENIE Results; CREBBP_p.G1374V; A1101
KTVEVKPVMK

SEQ ID NO: 22726 - protein, 10 aa, Homo sapiens
  AACR GENIE Results; CREBBP_p.G1374V; A0301
KTVEVKPVMK

SEQ ID NO: 22727 - protein, 9 aa, Homo sapiens
  AACR GENIE Results; CREBBP_p.G1374V; B5701
KTVEVKPVM

SEQ ID NO: 22728 - protein, 9 aa, Homo sapiens
  AACR GENIE Results; CREBBP_p.G1374V; C1601
KTVEVKPVM

SEQ ID NO: 22729 - protein, 9 aa, Homo sapiens
  AACR GENIE Results; CREBBP_p.G1374V; A1101
TVEVKPVMK

SEQ ID NO: 22730 - protein, 10 aa, Homo sapiens
  AACR GENIE Results; CREBBP_p.G1374V; B5701
KTVEVKPVMK

SEQ ID NO: 22731 - protein, 10 aa, Homo sapiens
  AACR GENIE Results; CREBBP_p.G1374V; A6801
KTVEVKPVMK

SEQ ID NO: 22732 - protein, 9 aa, Homo sapiens
  AACR GENIE Results; CREBBP_p.G1374V; A3001
KTVEVKPVM

SEQ ID NO: 22733 - protein, 9 aa, Homo sapiens
  AACR GENIE Results; CREBBP_p.G1374V; B1501
KTVEVKPVM

SEQ ID NO: 22734 - protein, 9 aa, Homo sapiens
  AACR GENIE Results; CREBBP_p.G1374V; A6801
TVEVKPVMK

SEQ ID NO: 22735 - protein, 8 aa, Homo sapiens
  AACR GENIE Results; CREBBP_p.G1374V; B0801
TVEVKPVM

SEQ ID NO: 22736 - protein, 9 aa, Homo sapiens
  AACR GENIE Results; CREBBP_p.G1374V; B3501
KTVEVKPVM

SEQ ID NO: 22737 - protein, 9 aa, Homo sapiens
  AACR GENIE Results; CREBBP_p.G1374V; C0304
KTVEVKPVM

SEQ ID NO: 22738 - protein, 9 aa, Homo sapiens
  AACR GENIE Results; CREBBP_p.G1374V; C1203
KTVEVKPVM

SEQ ID NO: 22739 - protein, 10 aa, Homo sapiens
  AACR GENIE Results; CREBBP_p.G1374V; A3101
KTVEVKPVMK

SEQ ID NO: 22740 - protein, 9 aa, Homo sapiens
  AACR GENIE Results; CREBBP_p.G1374V; A6801
EVKPVMKSR

SEQ ID NO: 22741 - protein, 9 aa, Homo sapiens
  AACR GENIE Results; CREBBP_p.G1374V; B1302
KTVEVKPVM

SEQ ID NO: 22742 - protein, 9 aa, Homo sapiens
  AACR GENIE Results; CREBBP_p.G1374V; C1502
KTVEVKPVM

SEQ ID NO: 22743 - protein, 9 aa, Homo sapiens
  AACR GENIE Results; CREBBP_p.G1374V; A3201
KTVEVKPVM

SEQ ID NO: 22744 - protein, 9 aa, Homo sapiens
  AACR GENIE Results; CREBBP_p.G1374V; A0301
TVEVKPVMK

SEQ ID NO: 22745 - protein, 8 aa, Homo sapiens
  AACR GENIE Results; CREBBP_p.G1374V; A1101
VEVKPVMK

SEQ ID NO: 22746 - protein, 9 aa, Homo sapiens
  AACR GENIE Results; CREBBP_p.G1374V; B0702
KTVEVKPVM

SEQ ID NO: 22747 - protein, 9 aa, Homo sapiens
  AACR GENIE Results; CREBBP_p.G1374V; A2301
KTVEVKPVM

SEQ ID NO: 22748 - protein, 9 aa, Homo sapiens
  AACR GENIE Results; CREBBP_p.G1374V; A3101
EVKPVMKSR

SEQ ID NO: 22749 - protein, 9 aa, Homo sapiens
  AACR GENIE Results; CREBBP_p.G1374V; A0201
KTVEVKPVM

SEQ ID NO: 22750 - protein, 9 aa, Homo sapiens
  AACR GENIE Results; CREBBP_p.G1374V; C0701
KTVEVKPVM

SEQ ID NO: 22751 - protein, 10 aa, Homo sapiens
  AACR GENIE Results; CREBBP_p.G1404S; B4403
EEIDSVDVCF

SEQ ID NO: 22752 - protein, 10 aa, Homo sapiens
  AACR GENIE Results; CREBBP_p.G1404S; B4001
EEIDSVDVCF

SEQ ID NO: 22753 - protein, 10 aa, Homo sapiens
  AACR GENIE Results; CREBBP_p.G1404S; B4402
EEIDSVDVCF

SEQ ID NO: 22754 - protein, 10 aa, Homo sapiens
  AACR GENIE Results; CREBBP_p.G1404S; B1801
EEIDSVDVCF

SEQ ID NO: 22755 - protein, 9 aa, Homo sapiens
  AACR GENIE Results; CREBBP_p.G1404S; B4001
FEEIDSVDV

SEQ ID NO: 22756 - protein, 9 aa, Homo sapiens
  AACR GENIE Results; CREBBP_p.G1404S; B5101
FAFEEIDSV

SEQ ID NO: 22757 - protein, 9 aa, Homo sapiens
  AACR GENIE Results; CREBBP_p.G1404S; C1203
FAFEEIDSV

SEQ ID NO: 22758 - protein, 11 aa, Homo sapiens
  AACR GENIE Results; CREBBP_p.G1404S; A0201
ALFAFEEIDSV

SEQ ID NO: 22759 - protein, 9 aa, Homo sapiens
  AACR GENIE Results; CREBBP_p.G1404S; C0501
EIDSVDVCF

SEQ ID NO: 22760 - protein, 11 aa, Homo sapiens
  AACR GENIE Results; CREBBP_p.G1404S; B3501
FAFEEIDSVDV

SEQ ID NO: 22761 - protein, 9 aa, Homo sapiens
  AACR GENIE Results; CREBBP_p.G1404S; B3501
FAFEEIDSV

SEQ ID NO: 22762 - protein, 11 aa, Homo sapiens
  AACR GENIE Results; CREBBP_p.G1404S; B4403
EEIDSVDVCFF

SEQ ID NO: 22763 - protein, 9 aa, Homo sapiens
  AACR GENIE Results; CREBBP_p.G1404S; A0201
FAFEEIDSV

SEQ ID NO: 22764 - protein, 10 aa, Homo sapiens
  AACR GENIE Results; CREBBP_p.K1139T; A6801
NPMDLSTITR

SEQ ID NO: 22765 - protein, 11 aa, Homo sapiens
  AACR GENIE Results; CREBBP_p.K1139T; A6801
NPMDLSTITRK

SEQ ID NO: 22766 - protein, 10 aa, Homo sapiens
  AACR GENIE Results; CREBBP_p.K1139T; B3501
NPMDLSTITR

SEQ ID NO: 22767 - protein, 9 aa, Homo sapiens
  AACR GENIE Results; CREBBP_p.R742P; C0102
MGPPAASPM

SEQ ID NO: 22768 - protein, 11 aa, Homo sapiens
  AACR GENIE Results; CREBBP_p.R742P; B0702
APMGPPAASPM

SEQ ID NO: 22769 - protein, 11 aa, Homo sapiens
  AACR GENIE Results; CREBBP_p.R742P; B3501
APMGPPAASPM

SEQ ID NO: 22770 - protein, 10 aa, Homo sapiens
  AACR GENIE Results; CREBBP_p.R742P; B0702
APMGPPAASP

SEQ ID NO: 22771 - protein, 11 aa, Homo sapiens
  AACR GENIE Results; CREBBP_p.S1934P; A1101
TQPPTTVPTGK

SEQ ID NO: 22772 - protein, 9 aa, Homo sapiens
  AACR GENIE Results; CSF1R_p.A629S; C0501
HADEKESLM

SEQ ID NO: 22773 - protein, 9 aa, Homo sapiens
  AACR GENIE Results; CSF1R_p.A629S; B3502
HADEKESLM

SEQ ID NO: 22774 - protein, 9 aa, Homo sapiens
  AACR GENIE Results; CSF1R_p.A629S; C0802
HADEKESLM

SEQ ID NO: 22775 - protein, 9 aa, Homo sapiens
  AACR GENIE Results; CSF1R_p.A629S; B3801
AHADEKESL

SEQ ID NO: 22776 - protein, 9 aa, Homo sapiens
  AACR GENIE Results; CSF1R_p.A629S; B3503
HADEKESLM

SEQ ID NO: 22777 - protein, 8 aa, Homo sapiens
  AACR GENIE Results; CSF1R_p.A629S; C0802
HADEKESL

SEQ ID NO: 22778 - protein, 9 aa, Homo sapiens
  AACR GENIE Results; CSF1R_p.A629S; B3901
AHADEKESL

SEQ ID NO: 22779 - protein, 8 aa, Homo sapiens
  AACR GENIE Results; CSF1R_p.A629S; B3502
HADEKESL

SEQ ID NO: 22780 - protein, 8 aa, Homo sapiens
  AACR GENIE Results; CSF1R_p.A629S; C0501
HADEKESL

SEQ ID NO: 22781 - protein, 9 aa, Homo sapiens
  AACR GENIE Results; CSF1R_p.A629S; B3501
HADEKESLM

SEQ ID NO: 22782 - protein, 9 aa, Homo sapiens
  AACR GENIE Results; CSF1R_p.A629S; C0401
HADEKESLM

SEQ ID NO: 22783 - protein, 9 aa, Homo sapiens
  AACR GENIE Results; CSF1R_p.A629S; C0304
HADEKESLM

SEQ ID NO: 22784 - protein, 8 aa, Homo sapiens
  AACR GENIE Results; CSF1R_p.A629S; B3701
KESLMSEL

SEQ ID NO: 22785 - protein, 10 aa, Homo sapiens
  AACR GENIE Results; CSF1R_p.A629S; B3502
TAHADEKESL

SEQ ID NO: 22786 - protein, 10 aa, Homo sapiens
  AACR GENIE Results; CSF1R_p.A629S; B3801
AHADEKESLM

SEQ ID NO: 22787 - protein, 8 aa, Homo sapiens
  AACR GENIE Results; CSF1R_p.A629S; B4001
KESLMSEL

SEQ ID NO: 22788 - protein, 8 aa, Homo sapiens
  AACR GENIE Results; CSF1R_p.A629S; B3503
HADEKESL

SEQ ID NO: 22789 - protein, 10 aa, Homo sapiens
  AACR GENIE Results; CSF1R_p.A629S; B3503
TAHADEKESL

SEQ ID NO: 22790 - protein, 8 aa, Homo sapiens
  AACR GENIE Results; CSF1R_p.A629S; B4002
KESLMSEL

SEQ ID NO: 22791 - protein, 10 aa, Homo sapiens
  AACR GENIE Results; CSF1R_p.A629S; A3001
DEKESLMSEL

SEQ ID NO: 22792 - protein, 8 aa, Homo sapiens
  AACR GENIE Results; CSF1R_p.A629S; B0801
HADEKESL

SEQ ID NO: 22793 - protein, 10 aa, Homo sapiens
  AACR GENIE Results; CSF1R_p.A629S; B4002
DEKESLMSEL

SEQ ID NO: 22794 - protein, 9 aa, Homo sapiens
  AACR GENIE Results; CSF1R_p.A629S; C1701
HADEKESLM

SEQ ID NO: 22795 - protein, 10 aa, Homo sapiens
  AACR GENIE Results; CSF1R_p.A629S; B3901
AHADEKESLM

SEQ ID NO: 22796 - protein, 9 aa, Homo sapiens
  AACR GENIE Results; CSF1R_p.A629S; B3801
HADEKESLM

SEQ ID NO: 22797 - protein, 8 aa, Homo sapiens
  AACR GENIE Results; CSF1R_p.A629S; A3001
KESLMSEL

SEQ ID NO: 22798 - protein, 9 aa, Homo sapiens
  AACR GENIE Results; CSF1R_p.A629S; C0303
HADEKESLM

SEQ ID NO: 22799 - protein, 10 aa, Homo sapiens
  AACR GENIE Results; CSF1R_p.A629S; B1801
DEKESLMSEL

SEQ ID NO: 22800 - protein, 9 aa, Homo sapiens
  AACR GENIE Results; CSF1R_p.A629S; B5101
HADEKESLM

SEQ ID NO: 22801 - protein, 9 aa, Homo sapiens
  AACR GENIE Results; CSF1R_p.P455H; C0401
VWDDPYHEV

SEQ ID NO: 22802 - protein, 9 aa, Homo sapiens
  AACR GENIE Results; CSF1R_p.P455H; C0501
VWDDPYHEV

SEQ ID NO: 22803 - protein, 10 aa, Homo sapiens
  AACR GENIE Results; CSF1R_p.P455H; C0401
VWDDPYHEVL

SEQ ID NO: 22804 - protein, 8 aa, Homo sapiens
  AACR GENIE Results; CSF1R_p.P455H; B0801
DDPYHEVL

SEQ ID NO: 22805 - protein, 9 aa, Homo sapiens
  AACR GENIE Results; CSF1R_p.P455H; B1801
HEVLSQEPF

SEQ ID NO: 22806 - protein, 8 aa, Homo sapiens
  AACR GENIE Results; CSF1R_p.P455H; B5101
DDPYHEVL

SEQ ID NO: 22807 - protein, 10 aa, Homo sapiens
  AACR GENIE Results; CSF1R_p.P455H; A0201
QVWDDPYHEV

SEQ ID NO: 22808 - protein, 10 aa, Homo sapiens
  AACR GENIE Results; CSF1R_p.P455H; C0501
VWDDPYHEVL

SEQ ID NO: 22809 - protein, 9 aa, Homo sapiens
  AACR GENIE Results; CSF1R_p.P455H; B4001
HEVLSQEPF

SEQ ID NO: 22810 - protein, 11 aa, Homo sapiens
  AACR GENIE Results; CTCF_p.E14K; B4403
VEAIVEESKTF

SEQ ID NO: 22811 - protein, 9 aa, Homo sapiens
  AACR GENIE Results; CTCF_p.E14K; B1501
AIVEESKTF

SEQ ID NO: 22812 - protein, 11 aa, Homo sapiens
  AACR GENIE Results; CTCF_p.E14K; A1101
AIVEESKTFIK

SEQ ID NO: 22813 - protein, 11 aa, Homo sapiens
  AACR GENIE Results; CTCF_p.E14K; B4402
VEAIVEESKTF

SEQ ID NO: 22814 - protein, 9 aa, Homo sapiens
  AACR GENIE Results; CTCF_p.E14K; C0501
IVEESKTFI

SEQ ID NO: 22815 - protein, 10 aa, Homo sapiens
  AACR GENIE Results; CTCF_p.E14K; B3501
EAIVEESKTF

SEQ ID NO: 22816 - protein, 10 aa, Homo sapiens
  AACR GENIE Results; CTCF_p.E14K; A1101
IVEESKTFIK

SEQ ID NO: 22817 - protein, 10 aa, Homo sapiens
  AACR GENIE Results; CTCF_p.E14K; A0301
IVEESKTFIK

SEQ ID NO: 22818 - protein, 10 aa, Homo sapiens
  AACR GENIE Results; CTCF_p.E14K; A0201
AIVEESKTFI

SEQ ID NO: 22819 - protein, 11 aa, Homo sapiens
  AACR GENIE Results; CTCF_p.E14K; B1801
VEAIVEESKTF

SEQ ID NO: 22820 - protein, 9 aa, Homo sapiens
  AACR GENIE Results; CTCF_p.E14K; A0301
KTFIKGKER

SEQ ID NO: 22821 - protein, 10 aa, Homo sapiens
  AACR GENIE Results; CTCF_p.E14K; A2601
EAIVEESKTF

SEQ ID NO: 22822 - protein, 8 aa, Homo sapiens
  AACR GENIE Results; CTNNB1_p.D32G; B5101
QSYLGSGI

SEQ ID NO: 22823 - protein, 10 aa, Homo sapiens
  AACR GENIE Results; CTNNB1_p.D32G; A0201
YLGSGIHSGA

SEQ ID NO: 22824 - protein, 11 aa, Homo sapiens
  AACR GENIE Results; CTNNB1_p.D32G; A0201
YLGSGIHSGAT

SEQ ID NO: 22825 - protein, 9 aa, Homo sapiens
  AACR GENIE Results; CTNNB1_p.D32G; A6801
LGSGIHSGA

SEQ ID NO: 22826 - protein, 9 aa, Homo sapiens
  AACR GENIE Results; CTNNB1_p.D32G; A1101
QSYLGSGIH

SEQ ID NO: 22827 - protein, 9 aa, Homo sapiens
  AACR GENIE Results; CTNNB1_p.D32G; B0801
YLGSGIHSG

SEQ ID NO: 22828 - protein, 9 aa, Homo sapiens
  AACR GENIE Results; CTNNB1_p.D32G; B0801
LGSGIHSGA

SEQ ID NO: 22829 - protein, 9 aa, Homo sapiens
  AACR GENIE Results; CTNNB1_p.D32G; A0301
QSYLGSGIH

SEQ ID NO: 22830 - protein, 9 aa, Homo sapiens
  AACR GENIE Results; CTNNB1_p.D32G; A0201
YLGSGIHSG

SEQ ID NO: 22831 - protein, 10 aa, Homo sapiens
  AACR GENIE Results; CTNNB1_p.D32G; A1101
SYLGSGIHSG

SEQ ID NO: 22832 - protein, 10 aa, Homo sapiens
  AACR GENIE Results; CTNNB1_p.D32G; A0201
SYLGSGIHSG

SEQ ID NO: 22833 - protein, 10 aa, Homo sapiens
  AACR GENIE Results; CTNNB1_p.D32G; B0801
YLGSGIHSGA

SEQ ID NO: 22834 - protein, 11 aa, Homo sapiens
  AACR GENIE Results; CTNNB1_p.D32G; A6801
QSYLGSGIHSG

SEQ ID NO: 22835 - protein, 10 aa, Homo sapiens
  AACR GENIE Results; CTNNB1_p.D32N; A0201
YLNSGIHSGA

SEQ ID NO: 22836 - protein, 11 aa, Homo sapiens
  AACR GENIE Results; CTNNB1_p.D32N; A0201
YLNSGIHSGAT

SEQ ID NO: 22837 - protein, 8 aa, Homo sapiens
  AACR GENIE Results; CTNNB1_p.D32N; B5101
QSYLNSGI

SEQ ID NO: 22838 - protein, 9 aa, Homo sapiens
  AACR GENIE Results; CTNNB1_p.D32N; A0201
YLNSGIHSG

SEQ ID NO: 22839 - protein, 9 aa, Homo sapiens
  AACR GENIE Results; CTNNB1_p.D32N; A1101
QSYLNSGIH

SEQ ID NO: 22840 - protein, 9 aa, Homo sapiens
  AACR GENIE Results; CTNNB1_p.D32N; B0801
YLNSGIHSG

SEQ ID NO: 22841 - protein, 10 aa, Homo sapiens
  AACR GENIE Results; CTNNB1_p.D32N; B1501
YLNSGIHSGA

SEQ ID NO: 22842 - protein, 10 aa, Homo sapiens
  AACR GENIE Results; CTNNB1_p.D32N; B0801
YLNSGIHSGA

SEQ ID NO: 22843 - protein, 10 aa, Homo sapiens
  AACR GENIE Results; CTNNB1_p.D32N; A0301
YLNSGIHSGA

SEQ ID NO: 22844 - protein, 9 aa, Homo sapiens
  AACR GENIE Results; CTNNB1_p.D32N; A2601
YLNSGIHSG

SEQ ID NO: 22845 - protein, 9 aa, Homo sapiens
  AACR GENIE Results; CTNNB1_p.D32N; A0301
QSYLNSGIH

SEQ ID NO: 22846 - protein, 9 aa, Homo sapiens
  AACR GENIE Results; CTNNB1_p.D32N; A0301
YLNSGIHSG

SEQ ID NO: 22847 - protein, 9 aa, Homo sapiens
  AACR GENIE Results; CTNNB1_p.D32Y; A2902
HWQQQSYLY

SEQ ID NO: 22848 - protein, 10 aa, Homo sapiens
  AACR GENIE Results; CTNNB1_p.D32Y; A0201
YLYSGIHSGA

SEQ ID NO: 22849 - protein, 9 aa, Homo sapiens
  AACR GENIE Results; CTNNB1_p.D32Y; A0201
YLYSGIHSG

SEQ ID NO: 22850 - protein, 11 aa, Homo sapiens
  AACR GENIE Results; CTNNB1_p.D32Y; A0201
YLYSGIHSGAT

SEQ ID NO: 22851 - protein, 8 aa, Homo sapiens
  AACR GENIE Results; CTNNB1_p.D32Y; B1501
WQQQSYLY

SEQ ID NO: 22852 - protein, 10 aa, Homo sapiens
  AACR GENIE Results; CTNNB1_p.D32Y; A3101
SYLYSGIHSG

SEQ ID NO: 22853 - protein, 10 aa, Homo sapiens
  AACR GENIE Results; CTNNB1_p.D32Y; A0301
YLYSGIHSGA

SEQ ID NO: 22854 - protein, 9 aa, Homo sapiens
  AACR GENIE Results; CTNNB1_p.D32Y; B0801
YSGIHSGAT

SEQ ID NO: 22855 - protein, 9 aa, Homo sapiens
  AACR GENIE Results; CTNNB1_p.D32Y; A3101
LYSGIHSGA

SEQ ID NO: 22856 - protein, 9 aa, Homo sapiens
  AACR GENIE Results; CTNNB1_p.D32Y; A0301
YLYSGIHSG

SEQ ID NO: 22857 - protein, 11 aa, Homo sapiens
  AACR GENIE Results; CTNNB1_p.D32Y; B0801
YLYSGIHSGAT

SEQ ID NO: 22858 - protein, 10 aa, Homo sapiens
  AACR GENIE Results; CTNNB1_p.D32Y; B1501
YLYSGIHSGA

SEQ ID NO: 22859 - protein, 9 aa, Homo sapiens
  AACR GENIE Results; CTNNB1_p.D32Y; A3101
YLYSGIHSG

SEQ ID NO: 22860 - protein, 9 aa, Homo sapiens
  AACR GENIE Results; CTNNB1_p.D32Y; A2601
YLYSGIHSG

SEQ ID NO: 22861 - protein, 9 aa, Homo sapiens
  AACR GENIE Results; CTNNB1_p.D32Y; B0801
YLYSGIHSG

SEQ ID NO: 22862 - protein, 9 aa, Homo sapiens
  AACR GENIE Results; CTNNB1_p.D32Y; A3101
SYLYSGIHS

SEQ ID NO: 22863 - protein, 8 aa, Homo sapiens
  AACR GENIE Results; CTNNB1_p.D32Y; B5101
QSYLYSGI

SEQ ID NO: 22864 - protein, 11 aa, Homo sapiens
  AACR GENIE Results; CTNNB1_p.D32Y; A3101
YLYSGIHSGAT

SEQ ID NO: 22865 - protein, 8 aa, Homo sapiens
  AACR GENIE Results; CTNNB1_p.D32Y; B0801
YSGIHSGA

SEQ ID NO: 22866 - protein, 11 aa, Homo sapiens
  AACR GENIE Results; CTNNB1_p.D32Y; A3101
SYLYSGIHSGA

SEQ ID NO: 22867 - protein, 10 aa, Homo sapiens
  AACR GENIE Results; CTNNB1_p.D32Y; B0801
YLYSGIHSGA

SEQ ID NO: 22868 - protein, 8 aa, Homo sapiens
  AACR GENIE Results; CTNNB1_p.D32Y; C1203
YSGIHSGA

SEQ ID NO: 22869 - protein, 10 aa, Homo sapiens
  AACR GENIE Results; CTNNB1_p.D32Y; A0201
LYSGIHSGAT

SEQ ID NO: 22870 - protein, 10 aa, Homo sapiens
  AACR GENIE Results; CTNNB1_p.D32Y; A2902
YLYSGIHSGA

SEQ ID NO: 22871 - protein, 10 aa, Homo sapiens
  AACR GENIE Results; CTNNB1_p.G34E; A0201
YLDSEIHSGA

SEQ ID NO: 22872 - protein, 11 aa, Homo sapiens
  AACR GENIE Results; CTNNB1_p.G34E; A0201
YLDSEIHSGAT

SEQ ID NO: 22873 - protein, 9 aa, Homo sapiens
  AACR GENIE Results; CTNNB1_p.G34E; A0201
YLDSEIHSG

SEQ ID NO: 22874 - protein, 11 aa, Homo sapiens
  AACR GENIE Results; CTNNB1_p.G34E; A0101
YLDSEIHSGAT

SEQ ID NO: 22875 - protein, 9 aa, Homo sapiens
  AACR GENIE Results; CTNNB1_p.G34E; A0201
LDSEIHSGA

SEQ ID NO: 22876 - protein, 10 aa, Homo sapiens
  AACR GENIE Results; CTNNB1_p.G34E; A0101
YLDSEIHSGA

SEQ ID NO: 22877 - protein, 9 aa, Homo sapiens
  AACR GENIE Results; CTNNB1_p.G34E; B0801
EIHSGATTT

SEQ ID NO: 22878 - protein, 11 aa, Homo sapiens
  AACR GENIE Results; CTNNB1_p.G34E; A1101
SEIHSGATTTA

SEQ ID NO: 22879 - protein, 10 aa, Homo sapiens
  AACR GENIE Results; CTNNB1_p.G34R; B1501
RIHSGATTTA

SEQ ID NO: 22880 - protein, 10 aa, Homo sapiens
  AACR GENIE Results; CTNNB1_p.G34R; A0201
YLDSRIHSGA

SEQ ID NO: 22881 - protein, 9 aa, Homo sapiens
  AACR GENIE Results; CTNNB1_p.G34R; B1501
RIHSGATTT

SEQ ID NO: 22882 - protein, 10 aa, Homo sapiens
  AACR GENIE Results; CTNNB1_p.G34R; A0301
RIHSGATTTA

SEQ ID NO: 22883 - protein, 8 aa, Homo sapiens
  AACR GENIE Results; CTNNB1_p.G34R; B5101
QSYLDSRI

SEQ ID NO: 22884 - protein, 9 aa, Homo sapiens
  AACR GENIE Results; CTNNB1_p.G34R; A0201
YLDSRIHSG

SEQ ID NO: 22885 - protein, 10 aa, Homo sapiens
  AACR GENIE Results; CTNNB1_p.G34R; B0702
RIHSGATTTA

SEQ ID NO: 22886 - protein, 8 aa, Homo sapiens
  AACR GENIE Results; CTNNB1_p.G34V; B1402
DSVIHSGA

SEQ ID NO: 22887 - protein, 10 aa, Homo sapiens
  AACR GENIE Results; CTNNB1_p.G34V; A3101
SYLDSVIHSG

SEQ ID NO: 22888 - protein, 9 aa, Homo sapiens
  AACR GENIE Results; CTNNB1_p.G34V; B1302
QQSYLDSVI

SEQ ID NO: 22889 - protein, 9 aa, Homo sapiens
  AACR GENIE Results; CTNNB1_p.G34V; B3801
QQSYLDSVI

SEQ ID NO: 22890 - protein, 9 aa, Homo sapiens
  AACR GENIE Results; CTNNB1_p.G34V; B1302
QQQSYLDSV

SEQ ID NO: 22891 - protein, 10 aa, Homo sapiens
  AACR GENIE Results; CTNNB1_p.G34V; A2902
SYLDSVIHSG

SEQ ID NO: 22892 - protein, 9 aa, Homo sapiens
  AACR GENIE Results; CTNNB1_p.G34V; A2301
SYLDSVIHS

SEQ ID NO: 22893 - protein, 10 aa, Homo sapiens
  AACR GENIE Results; CTNNB1_p.G34V; A0201
YLDSVIHSGA

SEQ ID NO: 22894 - protein, 10 aa, Homo sapiens
  AACR GENIE Results; CTNNB1_p.G34V; B1501
VIHSGATTTA

SEQ ID NO: 22895 - protein, 9 aa, Homo sapiens
  AACR GENIE Results; CTNNB1_p.G34V; B1501
VIHSGATTT

SEQ ID NO: 22896 - protein, 10 aa, Homo sapiens
  AACR GENIE Results; CTNNB1_p.G34V; A2301
SYLDSVIHSG

SEQ ID NO: 22897 - protein, 9 aa, Homo sapiens
  AACR GENIE Results; CTNNB1_p.G34V; A0201
YLDSVIHSG

SEQ ID NO: 22898 - protein, 11 aa, Homo sapiens
  AACR GENIE Results; CTNNB1_p.G34V; B1501
SVIHSGATTTA

SEQ ID NO: 22899 - protein, 10 aa, Homo sapiens
  AACR GENIE Results; CTNNB1_p.G34V; A6801
SVIHSGATTT

SEQ ID NO: 22900 - protein, 9 aa, Homo sapiens
  AACR GENIE Results; CTNNB1_p.G34V; A3101
SYLDSVIHS

SEQ ID NO: 22901 - protein, 9 aa, Homo sapiens
  AACR GENIE Results; CTNNB1_p.G34V; B1501
SVIHSGATT

SEQ ID NO: 22902 - protein, 9 aa, Homo sapiens
  AACR GENIE Results; CTNNB1_p.G34V; B1302
YLDSVIHSG

SEQ ID NO: 22903 - protein, 10 aa, Homo sapiens
  AACR GENIE Results; CTNNB1_p.G34V; A1101
SVIHSGATTT

SEQ ID NO: 22904 - protein, 11 aa, Homo sapiens
  AACR GENIE Results; CTNNB1_p.G34V; A0101
YLDSVIHSGAT

SEQ ID NO: 22905 - protein, 8 aa, Homo sapiens
  AACR GENIE Results; CTNNB1_p.G34V; B1302
QQSYLDSV

SEQ ID NO: 22906 - protein, 8 aa, Homo sapiens
  AACR GENIE Results; CTNNB1_p.G34V; B5101
QSYLDSVI

SEQ ID NO: 22907 - protein, 11 aa, Homo sapiens
  AACR GENIE Results; CTNNB1_p.G34V; A3101
SYLDSVIHSGA

SEQ ID NO: 22908 - protein, 9 aa, Homo sapiens
  AACR GENIE Results; CTNNB1_p.G34V; B0801
VIHSGATTT

SEQ ID NO: 22909 - protein, 11 aa, Homo sapiens
  AACR GENIE Results; CTNNB1_p.G34V; A0201
SYLDSVIHSGA

SEQ ID NO: 22910 - protein, 9 aa, Homo sapiens
  AACR GENIE Results; CTNNB1_p.G34V; A2402
SYLDSVIHS

SEQ ID NO: 22911 - protein, 11 aa, Homo sapiens
  AACR GENIE Results; CTNNB1_p.G34V; A1101
SVIHSGATTTA

SEQ ID NO: 22912 - protein, 10 aa, Homo sapiens
  AACR GENIE Results; CTNNB1_p.G34V; B2705
SYLDSVIHSG

SEQ ID NO: 22913 - protein, 8 aa, Homo sapiens
  AACR GENIE Results; CTNNB1_p.G34V; B0801
DSVIHSGA

SEQ ID NO: 22914 - protein, 9 aa, Homo sapiens
  AACR GENIE Results; CTNNB1_p.G34V; A0101
YLDSVIHSG

SEQ ID NO: 22915 - protein, 11 aa, Homo sapiens
  AACR GENIE Results; CTNNB1_p.G34V; A6801
SVIHSGATTTA

SEQ ID NO: 22916 - protein, 10 aa, Homo sapiens
  AACR GENIE Results; CTNNB1_p.G34V; A3101
SVIHSGATTT

SEQ ID NO: 22917 - protein, 10 aa, Homo sapiens
  AACR GENIE Results; CTNNB1_p.G34V; B1302
VIHSGATTTA

SEQ ID NO: 22918 - protein, 8 aa, Homo sapiens
  AACR GENIE Results; CTNNB1_p.G34V; B5101
DSVIHSGA

SEQ ID NO: 22919 - protein, 9 aa, Homo sapiens
  AACR GENIE Results; CTNNB1_p.G34V; A3101
QQQSYLDSV

SEQ ID NO: 22920 - protein, 9 aa, Homo sapiens
  AACR GENIE Results; CTNNB1_p.G34V; C0802
YLDSVIHSG

SEQ ID NO: 22921 - protein, 11 aa, Homo sapiens
  AACR GENIE Results; CTNNB1_p.G34V; A0201
YLDSVIHSGAT

SEQ ID NO: 22922 - protein, 9 aa, Homo sapiens
  AACR GENIE Results; CTNNB1_p.G34V; A0201
QQQSYLDSV

SEQ ID NO: 22923 - protein, 11 aa, Homo sapiens
  AACR GENIE Results; CTNNB1_p.G34V; B3501
SVIHSGATTTA

SEQ ID NO: 22924 - protein, 9 aa, Homo sapiens
  AACR GENIE Results; CTNNB1_p.G34V; A1101
QSYLDSVIH

SEQ ID NO: 22925 - protein, 9 aa, Homo sapiens
  AACR GENIE Results; CTNNB1_p.G34V; B1302
VIHSGATTT

SEQ ID NO: 22926 - protein, 10 aa, Homo sapiens
  AACR GENIE Results; CTNNB1_p.G34V; A1101
SYLDSVIHSG

SEQ ID NO: 22927 - protein, 9 aa, Homo sapiens
  AACR GENIE Results; CTNNB1_p.G34V; B0702
SVIHSGATT

SEQ ID NO: 22928 - protein, 9 aa, Homo sapiens
  AACR GENIE Results; CTNNB1_p.G575R; C0304
IVEGCTRAL

SEQ ID NO: 22929 - protein, 9 aa, Homo sapiens
  AACR GENIE Results; CTNNB1_p.G575R; B2705
TRALHILAR

SEQ ID NO: 22930 - protein, 9 aa, Homo sapiens
  AACR GENIE Results; CTNNB1_p.G575R; C0802
IVEGCTRAL

SEQ ID NO: 22931 - protein, 8 aa, Homo sapiens
  AACR GENIE Results; CTNNB1_p.G575R; A6801
EIVEGCTR

SEQ ID NO: 22932 - protein, 9 aa, Homo sapiens
  AACR GENIE Results; CTNNB1_p.G575R; B4403
EEIVEGCTR

SEQ ID NO: 22933 - protein, 9 aa, Homo sapiens
  AACR GENIE Results; CTNNB1_p.G575R; C0303
IVEGCTRAL

SEQ ID NO: 22934 - protein, 9 aa, Homo sapiens
  AACR GENIE Results; CTNNB1_p.G575R; B0702
IVEGCTRAL

SEQ ID NO: 22935 - protein, 11 aa, Homo sapiens
  AACR GENIE Results; CTNNB1_p.G575R; B4402
EEIVEGCTRAL

SEQ ID NO: 22936 - protein, 9 aa, Homo sapiens
  AACR GENIE Results; CTNNB1_p.G575R; A2601
EIVEGCTRA

SEQ ID NO: 22937 - protein, 9 aa, Homo sapiens
  AACR GENIE Results; CTNNB1_p.G575R; A6801
EEIVEGCTR

SEQ ID NO: 22938 - protein, 9 aa, Homo sapiens
  AACR GENIE Results; CTNNB1_p.G575R; C0102
IVEGCTRAL

SEQ ID NO: 22939 - protein, 8 aa, Homo sapiens
  AACR GENIE Results; CTNNB1_p.G575R; A3101
RALHILAR

SEQ ID NO: 22940 - protein, 11 aa, Homo sapiens
  AACR GENIE Results; CTNNB1_p.G575R; A3101
RMEEIVEGCTR

SEQ ID NO: 22941 - protein, 10 aa, Homo sapiens
  AACR GENIE Results; CTNNB1_p.G575R; A2601
EIVEGCTRAL

SEQ ID NO: 22942 - protein, 11 aa, Homo sapiens
  AACR GENIE Results; CTNNB1_p.G575R; B4403
EEIVEGCTRAL

SEQ ID NO: 22943 - protein, 9 aa, Homo sapiens
  AACR GENIE Results; CTNNB1_p.G575R; B4402
EEIVEGCTR

SEQ ID NO: 22944 - protein, 10 aa, Homo sapiens
  AACR GENIE Results; CTNNB1_p.G575R; A6801
EIVEGCTRAL

SEQ ID NO: 22945 - protein, 10 aa, Homo sapiens
  AACR GENIE Results; CTNNB1_p.G575R; A3101
CTRALHILAR

SEQ ID NO: 22946 - protein, 10 aa, Homo sapiens
  AACR GENIE Results; CTNNB1_p.I35S; A0201
YLDSGSHSGA

SEQ ID NO: 22947 - protein, 9 aa, Homo sapiens
  AACR GENIE Results; CTNNB1_p.I35S; B3901
SHSGATTTA

SEQ ID NO: 22948 - protein, 9 aa, Homo sapiens
  AACR GENIE Results; CTNNB1_p.I35S; C0802
YLDSGSHSG

SEQ ID NO: 22949 - protein, 9 aa, Homo sapiens
  AACR GENIE Results; CTNNB1_p.I35S; B3901
YLDSGSHSG

SEQ ID NO: 22950 - protein, 9 aa, Homo sapiens
  AACR GENIE Results; CTNNB1_p.I35S; B3801
SHSGATTTA

SEQ ID NO: 22951 - protein, 11 aa, Homo sapiens
  AACR GENIE Results; CTNNB1_p.I35S; A3303
SYLDSGSHSGA

SEQ ID NO: 22952 - protein, 9 aa, Homo sapiens
  AACR GENIE Results; CTNNB1_p.I35S; A0201
YLDSGSHSG

SEQ ID NO: 22953 - protein, 10 aa, Homo sapiens
  AACR GENIE Results; CTNNB1_p.I35S; A0101
YLDSGSHSGA

SEQ ID NO: 22954 - protein, 10 aa, Homo sapiens
  AACR GENIE Results; CTNNB1_p.I35S; B3901
SYLDSGSHSG

SEQ ID NO: 22955 - protein, 10 aa, Homo sapiens
  AACR GENIE Results; CTNNB1_p.I35S; C0802
YLDSGSHSGA

SEQ ID NO: 22956 - protein, 8 aa, Homo sapiens
  AACR GENIE Results; CTNNB1_p.I35S; B3901
SHSGATTT

SEQ ID NO: 22957 - protein, 10 aa, Homo sapiens
  AACR GENIE Results; CTNNB1_p.I35S; B3901
SHSGATTTAP

SEQ ID NO: 22958 - protein, 10 aa, Homo sapiens
  AACR GENIE Results; CTNNB1_p.I35S; A3303
SYLDSGSHSG

SEQ ID NO: 22959 - protein, 10 aa, Homo sapiens
  AACR GENIE Results; CTNNB1_p.I35S; A2902
SYLDSGSHSG

SEQ ID NO: 22960 - protein, 10 aa, Homo sapiens
  AACR GENIE Results; CTNNB1_p.I35S; A3101
SYLDSGSHSG

SEQ ID NO: 22961 - protein, 11 aa, Homo sapiens
  AACR GENIE Results; CTNNB1_p.I35S; B3901
YLDSGSHSGAT

SEQ ID NO: 22962 - protein, 9 aa, Homo sapiens
  AACR GENIE Results; CTNNB1_p.I35S; B1302
YLDSGSHSG

SEQ ID NO: 22963 - protein, 11 aa, Homo sapiens
  AACR GENIE Results; CTNNB1_p.I35S; A3001
SYLDSGSHSGA

SEQ ID NO: 22964 - protein, 11 aa, Homo sapiens
  AACR GENIE Results; CTNNB1_p.I35S; A0201
YLDSGSHSGAT

SEQ ID NO: 22965 - protein, 10 aa, Homo sapiens
  AACR GENIE Results; CTNNB1_p.I35S; C1402
SYLDSGSHSG

SEQ ID NO: 22966 - protein, 10 aa, Homo sapiens
  AACR GENIE Results; CTNNB1_p.I35S; A0301
YLDSGSHSGA

SEQ ID NO: 22967 - protein, 11 aa, Homo sapiens
  AACR GENIE Results; CTNNB1_p.I35S; A3101
SYLDSGSHSGA

SEQ ID NO: 22968 - protein, 10 aa, Homo sapiens
  AACR GENIE Results; CTNNB1_p.I35S; B2702
YLDSGSHSGA

SEQ ID NO: 22969 - protein, 11 aa, Homo sapiens
  AACR GENIE Results; CTNNB1_p.I35S; B0801
YLDSGSHSGAT

SEQ ID NO: 22970 - protein, 11 aa, Homo sapiens
  AACR GENIE Results; CTNNB1_p.I35S; A0101
YLDSGSHSGAT

SEQ ID NO: 22971 - protein, 9 aa, Homo sapiens
  AACR GENIE Results; CTNNB1_p.I35S; A0101
YLDSGSHSG

SEQ ID NO: 22972 - protein, 9 aa, Homo sapiens
  AACR GENIE Results; CTNNB1_p.I35S; A3303
SYLDSGSHS

SEQ ID NO: 22973 - protein, 10 aa, Homo sapiens
  AACR GENIE Results; CTNNB1_p.I35S; B1302
YLDSGSHSGA

SEQ ID NO: 22974 - protein, 10 aa, Homo sapiens
  AACR GENIE Results; CTNNB1_p.I35S; A6802
YLDSGSHSGA

SEQ ID NO: 22975 - protein, 10 aa, Homo sapiens
  AACR GENIE Results; CTNNB1_p.I35S; B1501
GSHSGATTTA

SEQ ID NO: 22976 - protein, 11 aa, Homo sapiens
  AACR GENIE Results; CTNNB1_p.I35S; B3901
SYLDSGSHSGA

SEQ ID NO: 22977 - protein, 10 aa, Homo sapiens
  AACR GENIE Results; CTNNB1_p.I35S; B3801
SHSGATTTAP

SEQ ID NO: 22978 - protein, 11 aa, Homo sapiens
  AACR GENIE Results; CTNNB1_p.I35S; A0201
SYLDSGSHSGA

SEQ ID NO: 22979 - protein, 11 aa, Homo sapiens
  AACR GENIE Results; CTNNB1_p.I35S; A6802
YLDSGSHSGAT

SEQ ID NO: 22980 - protein, 10 aa, Homo sapiens
  AACR GENIE Results; CTNNB1_p.I35S; A2402
SYLDSGSHSG

SEQ ID NO: 22981 - protein, 10 aa, Homo sapiens
  AACR GENIE Results; CTNNB1_p.K335I; B5701
RTYTYEILLW

SEQ ID NO: 22982 - protein, 9 aa, Homo sapiens
  AACR GENIE Results; CTNNB1_p.K335I; A2402
TYTYEILLW

SEQ ID NO: 22983 - protein, 9 aa, Homo sapiens
  AACR GENIE Results; CTNNB1_p.K335I; C1502
RTYTYEILL

SEQ ID NO: 22984 - protein, 9 aa, Homo sapiens
  AACR GENIE Results; CTNNB1_p.K335I; B5701
RTYTYEILL

SEQ ID NO: 22985 - protein, 9 aa, Homo sapiens
  AACR GENIE Results; CTNNB1_p.K335I; A2301
TYTYEILLW

SEQ ID NO: 22986 - protein, 9 aa, Homo sapiens
  AACR GENIE Results; CTNNB1_p.K335I; B2702
EILLWTTSR

SEQ ID NO: 22987 - protein, 9 aa, Homo sapiens
  AACR GENIE Results; CTNNB1_p.K335I; A6801
EILLWTTSR

SEQ ID NO: 22988 - protein, 9 aa, Homo sapiens
  AACR GENIE Results; CTNNB1_p.K335I; C0701
RTYTYEILL

SEQ ID NO: 22989 - protein, 9 aa, Homo sapiens
  AACR GENIE Results; CTNNB1_p.K335I; A3101
EILLWTTSR

SEQ ID NO: 22990 - protein, 8 aa, Homo sapiens
  AACR GENIE Results; CTNNB1_p.K335I; B5701
YTYEILLW

SEQ ID NO: 22991 - protein, 9 aa, Homo sapiens
  AACR GENIE Results; CTNNB1_p.K335I; A0201
ILLWTTSRV

SEQ ID NO: 22992 - protein, 9 aa, Homo sapiens
  AACR GENIE Results; CTNNB1_p.K335I; B4901
YEILLWTTS

SEQ ID NO: 22993 - protein, 9 aa, Homo sapiens
  AACR GENIE Results; CTNNB1_p.K335I; C1701
RTYTYEILL

SEQ ID NO: 22994 - protein, 11 aa, Homo sapiens
  AACR GENIE Results; CTNNB1_p.K335I; A0301
ILLWTTSRVLK

SEQ ID NO: 22995 - protein, 9 aa, Homo sapiens
  AACR GENIE Results; CTNNB1_p.K335I; C1203
RTYTYEILL

SEQ ID NO: 22996 - protein, 9 aa, Homo sapiens
  AACR GENIE Results; CTNNB1_p.K335I; C1601
RTYTYEILL

SEQ ID NO: 22997 - protein, 9 aa, Homo sapiens
  AACR GENIE Results; CTNNB1_p.M553V; B1501
SVGGTQQQF

SEQ ID NO: 22998 - protein, 9 aa, Homo sapiens
  AACR GENIE Results; CTNNB1_p.M553V; A3201
SVGGTQQQF

SEQ ID NO: 22999 - protein, 10 aa, Homo sapiens
  AACR GENIE Results; CTNNB1_p.M553V; B3501
TSVGGTQQQF

SEQ ID NO: 23000 - protein, 10 aa, Homo sapiens
  AACR GENIE Results; CTNNB1_p.M553V; B1501
TSVGGTQQQF

SEQ ID NO: 23001 - protein, 10 aa, Homo sapiens
  AACR GENIE Results; CTNNB1_p.M553V; A2601
TSVGGTQQQF

SEQ ID NO: 23002 - protein, 11 aa, Homo sapiens
  AACR GENIE Results; CTNNB1_p.M553V; B1501
RTSVGGTQQQF

SEQ ID NO: 23003 - protein, 11 aa, Homo sapiens
  AACR GENIE Results; CTNNB1_p.M553V; A3201
RTSVGGTQQQF

SEQ ID NO: 23004 - protein, 9 aa, Homo sapiens
  AACR GENIE Results; CTNNB1_p.M553V; B0801
QDTQRRTSV

SEQ ID NO: 23005 - protein, 9 aa, Homo sapiens
  AACR GENIE Results; CTNNB1_p.M553V; B3501
SVGGTQQQF

SEQ ID NO: 23006 - protein, 8 aa, Homo sapiens
  AACR GENIE Results; CTNNB1_p.M553V; C1601
VGGTQQQF

SEQ ID NO: 23007 - protein, 9 aa, Homo sapiens
  AACR GENIE Results; CTNNB1_p.M553V; B0702
QDTQRRTSV

SEQ ID NO: 23008 - protein, 9 aa, Homo sapiens
  AACR GENIE Results; CTNNB1_p.M553V; A2601
SVGGTQQQF

SEQ ID NO: 23009 - protein, 10 aa, Homo sapiens
  AACR GENIE Results; CTNNB1_p.M553V; B4403
TSVGGTQQQF

SEQ ID NO: 23010 - protein, 8 aa, Homo sapiens
  AACR GENIE Results; CTNNB1_p.M553V; B1501
VGGTQQQF

SEQ ID NO: 23011 - protein, 8 aa, Homo sapiens
  AACR GENIE Results; CTNNB1_p.M553V; B0801
VGGTQQQF

SEQ ID NO: 23012 - protein, 9 aa, Homo sapiens
  AACR GENIE Results; CTNNB1_p.M553V; B0702
SVGGTQQQF

SEQ ID NO: 23013 - protein, 10 aa, Homo sapiens
  AACR GENIE Results; CTNNB1_p.M553V; A1101
TSVGGTQQQF

SEQ ID NO: 23014 - protein, 11 aa, Homo sapiens
  AACR GENIE Results; CTNNB1_p.N387K; A0301
TLRKLSDAATK

SEQ ID NO: 23015 - protein, 8 aa, Homo sapiens
  AACR GENIE Results; CTNNB1_p.N387K; A0301
KLSDAATK

SEQ ID NO: 23016 - protein, 8 aa, Homo sapiens
  AACR GENIE Results; CTNNB1_p.R582W; C0401
AWDVHNRI

SEQ ID NO: 23017 - protein, 9 aa, Homo sapiens
  AACR GENIE Results; CTNNB1_p.R582W; B5701
TGALHILAW

SEQ ID NO: 23018 - protein, 8 aa, Homo sapiens
  AACR GENIE Results; CTNNB1_p.R582W; A3303
LAWDVHNR

SEQ ID NO: 23019 - protein, 9 aa, Homo sapiens
  AACR GENIE Results; CTNNB1_p.R582W; A3101
ILAWDVHNR

SEQ ID NO: 23020 - protein, 9 aa, Homo sapiens
  AACR GENIE Results; CTNNB1_p.R582W; B5101
LAWDVHNRI

SEQ ID NO: 23021 - protein, 8 aa, Homo sapiens
  AACR GENIE Results; CTNNB1_p.R582W; B5701
GALHILAW

SEQ ID NO: 23022 - protein, 8 aa, Homo sapiens
  AACR GENIE Results; CTNNB1_p.R582W; A3101
LAWDVHNR

SEQ ID NO: 23023 - protein, 9 aa, Homo sapiens
  AACR GENIE Results; CTNNB1_p.R582W; A6802
LAWDVHNRI

SEQ ID NO: 23024 - protein, 8 aa, Homo sapiens
  AACR GENIE Results; CTNNB1_p.R582W; A6801
LAWDVHNR

SEQ ID NO: 23025 - protein, 9 aa, Homo sapiens
  AACR GENIE Results; CTNNB1_p.R582W; C0401
AWDVHNRIV

SEQ ID NO: 23026 - protein, 9 aa, Homo sapiens
  AACR GENIE Results; CTNNB1_p.R582W; B4403
TGALHILAW

SEQ ID NO: 23027 - protein, 9 aa, Homo sapiens
  AACR GENIE Results; CTNNB1_p.R582W; A0201
ALHILAWDV

SEQ ID NO: 23028 - protein, 9 aa, Homo sapiens
  AACR GENIE Results; CTNNB1_p.R582W; B5701
LAWDVHNRI

SEQ ID NO: 23029 - protein, 10 aa, Homo sapiens
  AACR GENIE Results; CTNNB1_p.R582W; A3101
HILAWDVHNR

SEQ ID NO: 23030 - protein, 9 aa, Homo sapiens
  AACR GENIE Results; CTNNB1_p.R661Q; B3501
YAAAVLFQM

SEQ ID NO: 23031 - protein, 9 aa, Homo sapiens
  AACR GENIE Results; CTNNB1_p.R661Q; C0202
YAAAVLFQM

SEQ ID NO: 23032 - protein, 9 aa, Homo sapiens
  AACR GENIE Results; CTNNB1_p.R661Q; C1601
YAAAVLFQM

SEQ ID NO: 23033 - protein, 9 aa, Homo sapiens
  AACR GENIE Results; CTNNB1_p.R661Q; C0304
YAAAVLFQM

SEQ ID NO: 23034 - protein, 8 aa, Homo sapiens
  AACR GENIE Results; CTNNB1_p.R661Q; C1601
AAAVLFQM

SEQ ID NO: 23035 - protein, 9 aa, Homo sapiens
  AACR GENIE Results; CTNNB1_p.R661Q; C0303
YAAAVLFQM

SEQ ID NO: 23036 - protein, 9 aa, Homo sapiens
  AACR GENIE Results; CTNNB1_p.R661Q; C1203
YAAAVLFQM

SEQ ID NO: 23037 - protein, 10 aa, Homo sapiens
  AACR GENIE Results; CTNNB1_p.R661Q; A2402
TYAAAVLFQM

SEQ ID NO: 23038 - protein, 10 aa, Homo sapiens
  AACR GENIE Results; CTNNB1_p.R661Q; A1101
AVLFQMSEDK

SEQ ID NO: 23039 - protein, 10 aa, Homo sapiens
  AACR GENIE Results; CTNNB1_p.R661Q; A2301
TYAAAVLFQM

SEQ ID NO: 23040 - protein, 8 aa, Homo sapiens
  AACR GENIE Results; CTNNB1_p.R661Q; B3501
AAAVLFQM

SEQ ID NO: 23041 - protein, 11 aa, Homo sapiens
  AACR GENIE Results; CTNNB1_p.R661Q; B1501
FQMSEDKPQDY

SEQ ID NO: 23042 - protein, 8 aa, Homo sapiens
  AACR GENIE Results; CTNNB1_p.R661Q; C1203
AAAVLFQM

SEQ ID NO: 23043 - protein, 8 aa, Homo sapiens
  AACR GENIE Results; CTNNB1_p.R661Q; B1501
AAAVLFQM

SEQ ID NO: 23044 - protein, 9 aa, Homo sapiens
  AACR GENIE Results; CTNNB1_p.R661Q; B1302
YAAAVLFQM

SEQ ID NO: 23045 - protein, 10 aa, Homo sapiens
  AACR GENIE Results; CTNNB1_p.R661Q; A2902
TYAAAVLFQM

SEQ ID NO: 23046 - protein, 8 aa, Homo sapiens
  AACR GENIE Results; CTNNB1_p.R661Q; B0801
AAAVLFQM

SEQ ID NO: 23047 - protein, 9 aa, Homo sapiens
  AACR GENIE Results; CTNNB1_p.R661Q; A0201
YAAAVLFQM

SEQ ID NO: 23048 - protein, 8 aa, Homo sapiens
  AACR GENIE Results; CTNNB1_p.R661Q; A1101
AAAVLFQM

SEQ ID NO: 23049 - protein, 10 aa, Homo sapiens
  AACR GENIE Results; CTNNB1_p.R661Q; A0101
QMSEDKPQDY

SEQ ID NO: 23050 - protein, 9 aa, Homo sapiens
  AACR GENIE Results; CTNNB1_p.R661Q; A6801
YAAAVLFQM

SEQ ID NO: 23051 - protein, 8 aa, Homo sapiens
  AACR GENIE Results; CTNNB1_p.R661Q; B1302
AAAVLFQM

SEQ ID NO: 23052 - protein, 9 aa, Homo sapiens
  AACR GENIE Results; CTNNB1_p.R661Q; B5701
YAAAVLFQM

SEQ ID NO: 23053 - protein, 10 aa, Homo sapiens
  AACR GENIE Results; CTNNB1_p.R661Q; A0301
AVLFQMSEDK

SEQ ID NO: 23054 - protein, 9 aa, Homo sapiens
  AACR GENIE Results; CTNNB1_p.R661Q; A1101
YAAAVLFQM

SEQ ID NO: 23055 - protein, 8 aa, Homo sapiens
  AACR GENIE Results; CTNNB1_p.R661Q; B5101
AAAVLFQM

SEQ ID NO: 23056 - protein, 9 aa, Homo sapiens
  AACR GENIE Results; CTNNB1_p.R661Q; C1502
YAAAVLFQM

SEQ ID NO: 23057 - protein, 8 aa, Homo sapiens
  AACR GENIE Results; CTNNB1_p.R661Q; B5701
AAAVLFQM

SEQ ID NO: 23058 - protein, 9 aa, Homo sapiens
  AACR GENIE Results; CTNNB1_p.R661Q; A2902
YAAAVLFQM

SEQ ID NO: 23059 - protein, 9 aa, Homo sapiens
  AACR GENIE Results; CTNNB1_p.R661Q; B5101
YAAAVLFQM

SEQ ID NO: 23060 - protein, 9 aa, Homo sapiens
  AACR GENIE Results; CTNNB1_p.R661Q; A3001
YAAAVLFQM

SEQ ID NO: 23061 - protein, 10 aa, Homo sapiens
  AACR GENIE Results; CTNNB1_p.R661Q; A2902
QMSEDKPQDY

SEQ ID NO: 23062 - protein, 9 aa, Homo sapiens
  AACR GENIE Results; CTNNB1_p.R661Q; B0702
YAAAVLFQM

SEQ ID NO: 23063 - protein, 8 aa, Homo sapiens
  AACR GENIE Results; CTNNB1_p.R661Q; A6801
AAAVLFQM

SEQ ID NO: 23064 - protein, 10 aa, Homo sapiens
  AACR GENIE Results; CTNNB1_p.R661Q; B1501
QMSEDKPQDY

SEQ ID NO: 23065 - protein, 11 aa, Homo sapiens
  AACR GENIE Results; CTNNB1_p.R661Q; A1101
QMSEDKPQDYK

SEQ ID NO: 23066 - protein, 9 aa, Homo sapiens
  AACR GENIE Results; CTNNB1_p.R661Q; A2601
YAAAVLFQM

SEQ ID NO: 23067 - protein, 8 aa, Homo sapiens
  AACR GENIE Results; CTNNB1_p.R661Q; A2601
AAAVLFQM

SEQ ID NO: 23068 - protein, 8 aa, Homo sapiens
  AACR GENIE Results; CTNNB1_p.R661Q; B0702
AAAVLFQM

SEQ ID NO: 23069 - protein, 11 aa, Homo sapiens
  AACR GENIE Results; CTNNB1_p.R661Q; A3101
TYAAAVLFQMS

SEQ ID NO: 23070 - protein, 9 aa, Homo sapiens
  AACR GENIE Results; CTNNB1_p.S33C; B1302
QQSYLDCGI

SEQ ID NO: 23071 - protein, 10 aa, Homo sapiens
  AACR GENIE Results; CTNNB1_p.S33C; A0201
YLDCGIHSGA

SEQ ID NO: 23072 - protein, 9 aa, Homo sapiens
  AACR GENIE Results; CTNNB1_p.S33C; B3801
QQSYLDCGI

SEQ ID NO: 23073 - protein, 9 aa, Homo sapiens
  AACR GENIE Results; CTNNB1_p.S33C; A0201
YLDCGIHSG

SEQ ID NO: 23074 - protein, 9 aa, Homo sapiens
  AACR GENIE Results; CTNNB1_p.S33F; B1302
QQSYLDFGI

SEQ ID NO: 23075 - protein, 10 aa, Homo sapiens
  AACR GENIE Results; CTNNB1_p.S33F; A0201
YLDFGIHSGA

SEQ ID NO: 23076 - protein, 10 aa, Homo sapiens
  AACR GENIE Results; CTNNB1_p.S33F; A3101
SYLDFGIHSG

SEQ ID NO: 23077 - protein, 10 aa, Homo sapiens
  AACR GENIE Results; CTNNB1_p.S33F; A2301
SYLDFGIHSG

SEQ ID NO: 23078 - protein, 9 aa, Homo sapiens
  AACR GENIE Results; CTNNB1_p.S33F; A3101
SYLDFGIHS

SEQ ID NO: 23079 - protein, 10 aa, Homo sapiens
  AACR GENIE Results; CTNNB1_p.S33F; B0801
FGIHSGATTT

SEQ ID NO: 23080 - protein, 11 aa, Homo sapiens
  AACR GENIE Results; CTNNB1_p.S33F; A0201
YLDFGIHSGAT

SEQ ID NO: 23081 - protein, 9 aa, Homo sapiens
  AACR GENIE Results; CTNNB1_p.S33F; A2301
SYLDFGIHS

SEQ ID NO: 23082 - protein, 9 aa, Homo sapiens
  AACR GENIE Results; CTNNB1_p.S33F; B3801
QQSYLDFGI

SEQ ID NO: 23083 - protein, 10 aa, Homo sapiens
  AACR GENIE Results; CTNNB1_p.S33F; A0101
YLDFGIHSGA

SEQ ID NO: 23084 - protein, 9 aa, Homo sapiens
  AACR GENIE Results; CTNNB1_p.S33F; B1501
WQQQSYLDF

SEQ ID NO: 23085 - protein, 8 aa, Homo sapiens
  AACR GENIE Results; CTNNB1_p.S33F; B1501
QQQSYLDF

SEQ ID NO: 23086 - protein, 8 aa, Homo sapiens
  AACR GENIE Results; CTNNB1_p.S33F; A1101
LDFGIHSG

SEQ ID NO: 23087 - protein, 9 aa, Homo sapiens
  AACR GENIE Results; CTNNB1_p.S33F; A0201
YLDFGIHSG

SEQ ID NO: 23088 - protein, 10 aa, Homo sapiens
  AACR GENIE Results; CTNNB1_p.S33F; A2902
YLDFGIHSGA

SEQ ID NO: 23089 - protein, 8 aa, Homo sapiens
  AACR GENIE Results; CTNNB1_p.S33F; A0201
LDFGIHSG

SEQ ID NO: 23090 - protein, 10 aa, Homo sapiens
  AACR GENIE Results; CTNNB1_p.S33F; A0201
LDFGIHSGAT

SEQ ID NO: 23091 - protein, 10 aa, Homo sapiens
  AACR GENIE Results; CTNNB1_p.S33P; A0201
YLDPGIHSGA

SEQ ID NO: 23092 - protein, 9 aa, Homo sapiens
  AACR GENIE Results; CTNNB1_p.S33P; B1302
QQSYLDPGI

SEQ ID NO: 23093 - protein, 10 aa, Homo sapiens
  AACR GENIE Results; CTNNB1_p.S33P; A3303
SYLDPGIHSG

SEQ ID NO: 23094 - protein, 11 aa, Homo sapiens
  AACR GENIE Results; CTNNB1_p.S33P; A3303
SYLDPGIHSGA

SEQ ID NO: 23095 - protein, 10 aa, Homo sapiens
  AACR GENIE Results; CTNNB1_p.S33P; A3101
SYLDPGIHSG

SEQ ID NO: 23096 - protein, 9 aa, Homo sapiens
  AACR GENIE Results; CTNNB1_p.S33P; B3801
QQSYLDPGI

SEQ ID NO: 23097 - protein, 9 aa, Homo sapiens
  AACR GENIE Results; CTNNB1_p.S33P; A0201
YLDPGIHSG

SEQ ID NO: 23098 - protein, 9 aa, Homo sapiens
  AACR GENIE Results; CTNNB1_p.S33P; B3901
YLDPGIHSG

SEQ ID NO: 23099 - protein, 11 aa, Homo sapiens
  AACR GENIE Results; CTNNB1_p.S33P; A0201
YLDPGIHSGAT

SEQ ID NO: 23100 - protein, 11 aa, Homo sapiens
  AACR GENIE Results; CTNNB1_p.S33P; A3101
SYLDPGIHSGA

SEQ ID NO: 23101 - protein, 10 aa, Homo sapiens
  AACR GENIE Results; CTNNB1_p.S33P; A0101
YLDPGIHSGA

SEQ ID NO: 23102 - protein, 9 aa, Homo sapiens
  AACR GENIE Results; CTNNB1_p.S33P; A3303
SYLDPGIHS

SEQ ID NO: 23103 - protein, 10 aa, Homo sapiens
  AACR GENIE Results; CTNNB1_p.S33P; A2902
SYLDPGIHSG

SEQ ID NO: 23104 - protein, 10 aa, Homo sapiens
  AACR GENIE Results; CTNNB1_p.S33P; B2702
YLDPGIHSGA

SEQ ID NO: 23105 - protein, 11 aa, Homo sapiens
  AACR GENIE Results; CTNNB1_p.S33P; A0101
YLDPGIHSGAT

SEQ ID NO: 23106 - protein, 10 aa, Homo sapiens
  AACR GENIE Results; CTNNB1_p.S33P; A2301
SYLDPGIHSG

SEQ ID NO: 23107 - protein, 10 aa, Homo sapiens
  AACR GENIE Results; CTNNB1_p.S33P; A6802
YLDPGIHSGA

SEQ ID NO: 23108 - protein, 10 aa, Homo sapiens
  AACR GENIE Results; CTNNB1_p.S33P; A1101
SYLDPGIHSG

SEQ ID NO: 23109 - protein, 10 aa, Homo sapiens
  AACR GENIE Results; CTNNB1_p.S33P; A0301
YLDPGIHSGA

SEQ ID NO: 23110 - protein, 10 aa, Homo sapiens
  AACR GENIE Results; CTNNB1_p.S33P; B3901
SYLDPGIHSG

SEQ ID NO: 23111 - protein, 11 aa, Homo sapiens
  AACR GENIE Results; CTNNB1_p.S33P; A2902
SYLDPGIHSGA

SEQ ID NO: 23112 - protein, 10 aa, Homo sapiens
  AACR GENIE Results; CTNNB1_p.S33P; B1302
QQQSYLDPGI

SEQ ID NO: 23113 - protein, 8 aa, Homo sapiens
  AACR GENIE Results; CTNNB1_p.S33P; B1302
QSYLDPGI

SEQ ID NO: 23114 - protein, 9 aa, Homo sapiens
  AACR GENIE Results; CTNNB1_p.S33P; A3101
SYLDPGIHS

SEQ ID NO: 23115 - protein, 9 aa, Homo sapiens
  AACR GENIE Results; CTNNB1_p.S33P; B3801
YLDPGIHSG

SEQ ID NO: 23116 - protein, 10 aa, Homo sapiens
  AACR GENIE Results; CTNNB1_p.S33P; C0704
LDPGIHSGAT

SEQ ID NO: 23117 - protein, 9 aa, Homo sapiens
  AACR GENIE Results; CTNNB1_p.S33P; C0802
YLDPGIHSG

SEQ ID NO: 23118 - protein, 9 aa, Homo sapiens
  AACR GENIE Results; CTNNB1_p.S33P; B1302
YLDPGIHSG

SEQ ID NO: 23119 - protein, 9 aa, Homo sapiens
  AACR GENIE Results; CTNNB1_p.S33P; A0101
YLDPGIHSG

SEQ ID NO: 23120 - protein, 8 aa, Homo sapiens
  AACR GENIE Results; CTNNB1_p.S33P; A1101
LDPGIHSG

SEQ ID NO: 23121 - protein, 8 aa, Homo sapiens
  AACR GENIE Results; CTNNB1_p.S33P; B5101
QSYLDPGI

SEQ ID NO: 23122 - protein, 9 aa, Homo sapiens
  AACR GENIE Results; CTNNB1_p.S33P; A3101
YLDPGIHSG

SEQ ID NO: 23123 - protein, 11 aa, Homo sapiens
  AACR GENIE Results; CTNNB1_p.S33P; A6802
YLDPGIHSGAT

SEQ ID NO: 23124 - protein, 10 aa, Homo sapiens
  AACR GENIE Results; CTNNB1_p.S33P; B3801
QQQSYLDPGI

SEQ ID NO: 23125 - protein, 10 aa, Homo sapiens
  AACR GENIE Results; CTNNB1_p.S33P; C0802
YLDPGIHSGA

SEQ ID NO: 23126 - protein, 10 aa, Homo sapiens
  AACR GENIE Results; CTNNB1_p.S33P; A2402
SYLDPGIHSG

SEQ ID NO: 23127 - protein, 10 aa, Homo sapiens
  AACR GENIE Results; CTNNB1_p.S33P; A3001
SYLDPGIHSG

SEQ ID NO: 23128 - protein, 11 aa, Homo sapiens
  AACR GENIE Results; CTNNB1_p.S33P; B3901
YLDPGIHSGAT

SEQ ID NO: 23129 - protein, 10 aa, Homo sapiens
  AACR GENIE Results; CTNNB1_p.S33P; B1302
YLDPGIHSGA

SEQ ID NO: 23130 - protein, 10 aa, Homo sapiens
  AACR GENIE Results; CTNNB1_p.S33P; C1402
SYLDPGIHSG

SEQ ID NO: 23131 - protein, 10 aa, Homo sapiens
  AACR GENIE Results; CTNNB1_p.S33P; A1101
YLDPGIHSGA

SEQ ID NO: 23132 - protein, 9 aa, Homo sapiens
  AACR GENIE Results; CTNNB1_p.S33P; B0801
YLDPGIHSG

SEQ ID NO: 23133 - protein, 10 aa, Homo sapiens
  AACR GENIE Results; CTNNB1_p.S33P; A6801
SYLDPGIHSG

SEQ ID NO: 23134 - protein, 10 aa, Homo sapiens
  AACR GENIE Results; CTNNB1_p.S33P; A3101
YLDPGIHSGA

SEQ ID NO: 23135 - protein, 9 aa, Homo sapiens
  AACR GENIE Results; CTNNB1_p.S33P; A1101
QSYLDPGIH

SEQ ID NO: 23136 - protein, 10 aa, Homo sapiens
  AACR GENIE Results; CTNNB1_p.S33P; B0801
LDPGIHSGAT

SEQ ID NO: 23137 - protein, 9 aa, Homo sapiens
  AACR GENIE Results; CTNNB1_p.S33P; A2601
YLDPGIHSG

SEQ ID NO: 23138 - protein, 11 aa, Homo sapiens
  AACR GENIE Results; CTNNB1_p.S33P; A3101
YLDPGIHSGAT

SEQ ID NO: 23139 - protein, 9 aa, Homo sapiens
  AACR GENIE Results; CTNNB1_p.S33P; A0301
QSYLDPGIH

SEQ ID NO: 23140 - protein, 10 aa, Homo sapiens
  AACR GENIE Results; CTNNB1_p.S33P; A6801
LDPGIHSGAT

SEQ ID NO: 23141 - protein, 11 aa, Homo sapiens
  AACR GENIE Results; CTNNB1_p.S33P; A0201
SYLDPGIHSGA

SEQ ID NO: 23142 - protein, 10 aa, Homo sapiens
  AACR GENIE Results; CTNNB1_p.S33P; B1501
YLDPGIHSGA

SEQ ID NO: 23143 - protein, 9 aa, Homo sapiens
  AACR GENIE Results; CTNNB1_p.S37C; A0201
YLDSGIHCG

SEQ ID NO: 23144 - protein, 10 aa, Homo sapiens
  AACR GENIE Results; CTNNB1_p.S37C; A0201
YLDSGIHCGA

SEQ ID NO: 23145 - protein, 9 aa, Homo sapiens
  AACR GENIE Results; CTNNB1_p.S37C; C1402
SYLDSGIHC

SEQ ID NO: 23146 - protein, 10 aa, Homo sapiens
  AACR GENIE Results; CTNNB1_p.S37C; A3303
SYLDSGIHCG

SEQ ID NO: 23147 - protein, 10 aa, Homo sapiens
  AACR GENIE Results; CTNNB1_p.S37C; A3101
SYLDSGIHCG

SEQ ID NO: 23148 - protein, 10 aa, Homo sapiens
  AACR GENIE Results; CTNNB1_p.S37C; A0201
SYLDSGIHCG

SEQ ID NO: 23149 - protein, 9 aa, Homo sapiens
  AACR GENIE Results; CTNNB1_p.S37C; B3901
YLDSGIHCG

SEQ ID NO: 23150 - protein, 10 aa, Homo sapiens
  AACR GENIE Results; CTNNB1_p.S37C; B3901
SYLDSGIHCG

SEQ ID NO: 23151 - protein, 8 aa, Homo sapiens
  AACR GENIE Results; CTNNB1_p.S37C; C0802
YLDSGIHC

SEQ ID NO: 23152 - protein, 11 aa, Homo sapiens
  AACR GENIE Results; CTNNB1_p.S37C; A3101
SYLDSGIHCGA

SEQ ID NO: 23153 - protein, 10 aa, Homo sapiens
  AACR GENIE Results; CTNNB1_p.S37C; A3001
SYLDSGIHCG

SEQ ID NO: 23154 - protein, 8 aa, Homo sapiens
  AACR GENIE Results; CTNNB1_p.S37C; C0501
YLDSGIHC

SEQ ID NO: 23155 - protein, 11 aa, Homo sapiens
  AACR GENIE Results; CTNNB1_p.S37C; A3303
SYLDSGIHCGA

SEQ ID NO: 23156 - protein, 10 aa, Homo sapiens
  AACR GENIE Results; CTNNB1_p.S37C; A2301
SYLDSGIHCG

SEQ ID NO: 23157 - protein, 9 aa, Homo sapiens
  AACR GENIE Results; CTNNB1_p.S37C; B1302
YLDSGIHCG

SEQ ID NO: 23158 - protein, 10 aa, Homo sapiens
  AACR GENIE Results; CTNNB1_p.S37C; A6802
YLDSGIHCGA

SEQ ID NO: 23159 - protein, 8 aa, Homo sapiens
  AACR GENIE Results; CTNNB1_p.S37C; A0201
YLDSGIHC

SEQ ID NO: 23160 - protein, 8 aa, Homo sapiens
  AACR GENIE Results; CTNNB1_p.S37C; A0201
LDSGIHCG

SEQ ID NO: 23161 - protein, 10 aa, Homo sapiens
  AACR GENIE Results; CTNNB1_p.S37C; A0101
YLDSGIHCGA

SEQ ID NO: 23162 - protein, 8 aa, Homo sapiens
  AACR GENIE Results; CTNNB1_p.S37C; B3901
YLDSGIHC

SEQ ID NO: 23163 - protein, 9 aa, Homo sapiens
  AACR GENIE Results; CTNNB1_p.S37C; B3901
SYLDSGIHC

SEQ ID NO: 23164 - protein, 11 aa, Homo sapiens
  AACR GENIE Results; CTNNB1_p.S37C; A0201
SYLDSGIHCGA

SEQ ID NO: 23165 - protein, 9 aa, Homo sapiens
  AACR GENIE Results; CTNNB1_p.S37C; A6802
LDSGIHCGA

SEQ ID NO: 23166 - protein, 11 aa, Homo sapiens
  AACR GENIE Results; CTNNB1_p.S37C; B2705
SYLDSGIHCGA

SEQ ID NO: 23167 - protein, 9 aa, Homo sapiens
  AACR GENIE Results; CTNNB1_p.S37F; A2301
SYLDSGIHF

SEQ ID NO: 23168 - protein, 9 aa, Homo sapiens
  AACR GENIE Results; CTNNB1_p.S37F; C1402
SYLDSGIHF

SEQ ID NO: 23169 - protein, 9 aa, Homo sapiens
  AACR GENIE Results; CTNNB1_p.S37F; A2402
SYLDSGIHF

SEQ ID NO: 23170 - protein, 8 aa, Homo sapiens
  AACR GENIE Results; CTNNB1_p.S37F; C0501
YLDSGIHF

SEQ ID NO: 23171 - protein, 8 aa, Homo sapiens
  AACR GENIE Results; CTNNB1_p.S37F; C0802
YLDSGIHF

SEQ ID NO: 23172 - protein, 8 aa, Homo sapiens
  AACR GENIE Results; CTNNB1_p.S37F; C1701
YLDSGIHF

SEQ ID NO: 23173 - protein, 8 aa, Homo sapiens
  AACR GENIE Results; CTNNB1_p.S37F; C0401
YLDSGIHF

SEQ ID NO: 23174 - protein, 10 aa, Homo sapiens
  AACR GENIE Results; CTNNB1_p.S37F; A0201
YLDSGIHFGA

SEQ ID NO: 23175 - protein, 9 aa, Homo sapiens
  AACR GENIE Results; CTNNB1_p.S37F; B3901
IHFGATTTA

SEQ ID NO: 23176 - protein, 8 aa, Homo sapiens
  AACR GENIE Results; CTNNB1_p.S37F; B5801
YLDSGIHF

SEQ ID NO: 23177 - protein, 10 aa, Homo sapiens
  AACR GENIE Results; CTNNB1_p.S37F; A3101
SYLDSGIHFG

SEQ ID NO: 23178 - protein, 8 aa, Homo sapiens
  AACR GENIE Results; CTNNB1_p.S37F; B3801
YLDSGIHF

SEQ ID NO: 23179 - protein, 8 aa, Homo sapiens
  AACR GENIE Results; CTNNB1_p.S37F; A0101
YLDSGIHF

SEQ ID NO: 23180 - protein, 9 aa, Homo sapiens
  AACR GENIE Results; CTNNB1_p.S37F; C0702
SYLDSGIHF

SEQ ID NO: 23181 - protein, 9 aa, Homo sapiens
  AACR GENIE Results; CTNNB1_p.S37F; A0201
YLDSGIHFG

SEQ ID NO: 23182 - protein, 11 aa, Homo sapiens
  AACR GENIE Results; CTNNB1_p.S37F; A3101
SYLDSGIHFGA

SEQ ID NO: 23183 - protein, 8 aa, Homo sapiens
  AACR GENIE Results; CTNNB1_p.S37F; C0202
YLDSGIHF

SEQ ID NO: 23184 - protein, 10 aa, Homo sapiens
  AACR GENIE Results; CTNNB1_p.S37F; B1501
GIHFGATTTA

SEQ ID NO: 23185 - protein, 10 aa, Homo sapiens
  AACR GENIE Results; CTNNB1_p.S37F; A6802
YLDSGIHFGA

SEQ ID NO: 23186 - protein, 10 aa, Homo sapiens
  AACR GENIE Results; CTNNB1_p.S37F; B3503
FGATTTAPSL

SEQ ID NO: 23187 - protein, 8 aa, Homo sapiens
  AACR GENIE Results; CTNNB1_p.S37F; A2301
YLDSGIHF

SEQ ID NO: 23188 - protein, 10 aa, Homo sapiens
  AACR GENIE Results; CTNNB1_p.S37F; B5801
QSYLDSGIHF

SEQ ID NO: 23189 - protein, 9 aa, Homo sapiens
  AACR GENIE Results; CTNNB1_p.S37F; A2902
SYLDSGIHF

SEQ ID NO: 23190 - protein, 10 aa, Homo sapiens
  AACR GENIE Results; CTNNB1_p.S37F; B5701
QSYLDSGIHF

SEQ ID NO: 23191 - protein, 9 aa, Homo sapiens
  AACR GENIE Results; CTNNB1_p.S37F; A6802
LDSGIHFGA

SEQ ID NO: 23192 - protein, 10 aa, Homo sapiens
  AACR GENIE Results; CTNNB1_p.S37F; A0205
GIHFGATTTA

SEQ ID NO: 23193 - protein, 8 aa, Homo sapiens
  AACR GENIE Results; CTNNB1_p.S37F; C0304
YLDSGIHF

SEQ ID NO: 23194 - protein, 8 aa, Homo sapiens
  AACR GENIE Results; CTNNB1_p.S37F; B3901
YLDSGIHF

SEQ ID NO: 23195 - protein, 9 aa, Homo sapiens
  AACR GENIE Results; CTNNB1_p.S37F; B3801
IHFGATTTA

SEQ ID NO: 23196 - protein, 10 aa, Homo sapiens
  AACR GENIE Results; CTNNB1_p.S37F; A2902
SYLDSGIHFG

SEQ ID NO: 23197 - protein, 10 aa, Homo sapiens
  AACR GENIE Results; CTNNB1_p.S37F; B2702
YLDSGIHFGA

SEQ ID NO: 23198 - protein, 8 aa, Homo sapiens
  AACR GENIE Results; CTNNB1_p.S37F; B3901
IHFGATTT

SEQ ID NO: 23199 - protein, 8 aa, Homo sapiens
  AACR GENIE Results; CTNNB1_p.S37F; C0801
YLDSGIHF

SEQ ID NO: 23200 - protein, 10 aa, Homo sapiens
  AACR GENIE Results; CTNNB1_p.S37F; B5001
GIHFGATTTA

SEQ ID NO: 23201 - protein, 10 aa, Homo sapiens
  AACR GENIE Results; CTNNB1_p.S37F; B4002
FGATTTAPSL

SEQ ID NO: 23202 - protein, 9 aa, Homo sapiens
  AACR GENIE Results; CTNNB1_p.S37F; A3303
SYLDSGIHF

SEQ ID NO: 23203 - protein, 10 aa, Homo sapiens
  AACR GENIE Results; CTNNB1_p.S37F; A3301
SYLDSGIHFG

SEQ ID NO: 23204 - protein, 10 aa, Homo sapiens
  AACR GENIE Results; CTNNB1_p.S37F; A3303
SYLDSGIHFG

SEQ ID NO: 23205 - protein, 10 aa, Homo sapiens
  AACR GENIE Results; CTNNB1_p.S37F; A2902
YLDSGIHFGA

SEQ ID NO: 23206 - protein, 9 aa, Homo sapiens
  AACR GENIE Results; CTNNB1_p.S37F; B1501
GIHFGATTT

SEQ ID NO: 23207 - protein, 9 aa, Homo sapiens
  AACR GENIE Results; CTNNB1_p.S37F; B3901
SYLDSGIHF

SEQ ID NO: 23208 - protein, 9 aa, Homo sapiens
  AACR GENIE Results; CTNNB1_p.S37F; B0801
DSGIHFGAT

SEQ ID NO: 23209 - protein, 10 aa, Homo sapiens
  AACR GENIE Results; CTNNB1_p.S37F; A0101
YLDSGIHFGA

SEQ ID NO: 23210 - protein, 11 aa, Homo sapiens
  AACR GENIE Results; CTNNB1_p.S37F; A3303
SYLDSGIHFGA

SEQ ID NO: 23211 - protein, 9 aa, Homo sapiens
  AACR GENIE Results; CTNNB1_p.S37F; B3801
SYLDSGIHF

SEQ ID NO: 23212 - protein, 9 aa, Homo sapiens
  AACR GENIE Results; CTNNB1_p.S37F; B1503
SYLDSGIHF

SEQ ID NO: 23213 - protein, 10 aa, Homo sapiens
  AACR GENIE Results; CTNNB1_p.S37F; B3901
IHFGATTTAP

SEQ ID NO: 23214 - protein, 8 aa, Homo sapiens
  AACR GENIE Results; CTNNB1_p.S37F; A6801
DSGIHFGA

SEQ ID NO: 23215 - protein, 10 aa, Homo sapiens
  AACR GENIE Results; CTNNB1_p.S37F; A2301
SYLDSGIHFG

SEQ ID NO: 23216 - protein, 10 aa, Homo sapiens
  AACR GENIE Results; CTNNB1_p.S37F; B1302
YLDSGIHFGA

SEQ ID NO: 23217 - protein, 10 aa, Homo sapiens
  AACR GENIE Results; CTNNB1_p.S37F; B1302
GIHFGATTTA

SEQ ID NO: 23218 - protein, 11 aa, Homo sapiens
  AACR GENIE Results; CTNNB1_p.S37F; A2902
SYLDSGIHFGA

SEQ ID NO: 23219 - protein, 8 aa, Homo sapiens
  AACR GENIE Results; CTNNB1_p.S37F; C0302
YLDSGIHF

SEQ ID NO: 23220 - protein, 8 aa, Homo sapiens
  AACR GENIE Results; CTNNB1_p.S37F; C0303
YLDSGIHF

SEQ ID NO: 23221 - protein, 9 aa, Homo sapiens
  AACR GENIE Results; CTNNB1_p.S37F; C0401
SYLDSGIHF

SEQ ID NO: 23222 - protein, 8 aa, Homo sapiens
  AACR GENIE Results; CTNNB1_p.S37F; A3301
DSGIHFGA

SEQ ID NO: 23223 - protein, 10 aa, Homo sapiens
  AACR GENIE Results; CTNNB1_p.S37F; A6802
LDSGIHFGAT

SEQ ID NO: 23224 - protein, 10 aa, Homo sapiens
  AACR GENIE Results; CTNNB1_p.S37F; B1501
QSYLDSGIHF

SEQ ID NO: 23225 - protein, 8 aa, Homo sapiens
  AACR GENIE Results; CTNNB1_p.S37F; B3501
YLDSGIHF

SEQ ID NO: 23226 - protein, 10 aa, Homo sapiens
  AACR GENIE Results; CTNNB1_p.S37F; A6801
QSYLDSGIHF

SEQ ID NO: 23227 - protein, 9 aa, Homo sapiens
  AACR GENIE Results; CTNNB1_p.S37F; B5001
IHFGATTTA

SEQ ID NO: 23228 - protein, 9 aa, Homo sapiens
  AACR GENIE Results; CTNNB1_p.S37F; B1501
SYLDSGIHF

SEQ ID NO: 23229 - protein, 9 aa, Homo sapiens
  AACR GENIE Results; CTNNB1_p.S37F; B5001
LDSGIHFGA

SEQ ID NO: 23230 - protein, 9 aa, Homo sapiens
  AACR GENIE Results; CTNNB1_p.S37F; B3701
LDSGIHFGA

SEQ ID NO: 23231 - protein, 9 aa, Homo sapiens
  AACR GENIE Results; CTNNB1_p.S37F; A3101
SYLDSGIHF

SEQ ID NO: 23232 - protein, 9 aa, Homo sapiens
  AACR GENIE Results; CTNNB1_p.S37F; A1101
DSGIHFGAT

SEQ ID NO: 23233 - protein, 9 aa, Homo sapiens
  AACR GENIE Results; CTNNB1_p.S45del; A0301
TTTAPLSGK

SEQ ID NO: 23234 - protein, 10 aa, Homo sapiens
  AACR GENIE Results; CTNNB1_p.S45del; A0301
ATTTAPLSGK

SEQ ID NO: 23235 - protein, 11 aa, Homo sapiens
  AACR GENIE Results; CTNNB1_p.S45del; A0301
GATTTAPLSGK

SEQ ID NO: 23236 - protein, 8 aa, Homo sapiens
  AACR GENIE Results; CTNNB1_p.S45del; A0301
TTAPLSGK

SEQ ID NO: 23237 - protein, 9 aa, Homo sapiens
  AACR GENIE Results; CTNNB1_p.S45del; B0702
SGATTTAPL

SEQ ID NO: 23238 - protein, 9 aa, Homo sapiens
  AACR GENIE Results; CTNNB1_p.S45F; A1101
TTAPFLSGK

SEQ ID NO: 23239 - protein, 9 aa, Homo sapiens
  AACR GENIE Results; CTNNB1_p.S45F; A6801
TTAPFLSGK

SEQ ID NO: 23240 - protein, 9 aa, Homo sapiens
  AACR GENIE Results; CTNNB1_p.S45F; A0301
TTAPFLSGK

SEQ ID NO: 23241 - protein, 11 aa, Homo sapiens
  AACR GENIE Results; CTNNB1_p.S45F; A1101
ATTTAPFLSGK

SEQ ID NO: 23242 - protein, 9 aa, Homo sapiens
  AACR GENIE Results; CTNNB1_p.S45F; C1701
GATTTAPFL

SEQ ID NO: 23243 - protein, 10 aa, Homo sapiens
  AACR GENIE Results; CTNNB1_p.S45F; A6801
TTTAPFLSGK

SEQ ID NO: 23244 - protein, 9 aa, Homo sapiens
  AACR GENIE Results; CTNNB1_p.S45F; C0304
GATTTAPFL

SEQ ID NO: 23245 - protein, 9 aa, Homo sapiens
  AACR GENIE Results; CTNNB1_p.S45F; A3303
TTAPFLSGK

SEQ ID NO: 23246 - protein, 9 aa, Homo sapiens
  AACR GENIE Results; CTNNB1_p.S45F; C0303
GATTTAPFL

SEQ ID NO: 23247 - protein, 10 aa, Homo sapiens
  AACR GENIE Results; CTNNB1_p.S45F; A0301
TTTAPFLSGK

SEQ ID NO: 23248 - protein, 10 aa, Homo sapiens
  AACR GENIE Results; CTNNB1_p.S45F; A1101
TTTAPFLSGK

SEQ ID NO: 23249 - protein, 9 aa, Homo sapiens
  AACR GENIE Results; CTNNB1_p.S45F; A6802
TTAPFLSGK

SEQ ID NO: 23250 - protein, 8 aa, Homo sapiens
  AACR GENIE Results; CTNNB1_p.S45F; B5801
ATTTAPFL

SEQ ID NO: 23251 - protein, 9 aa, Homo sapiens
  AACR GENIE Results; CTNNB1_p.S45F; B5801
GATTTAPFL

SEQ ID NO: 23252 - protein, 8 aa, Homo sapiens
  AACR GENIE Results; CTNNB1_p.S45F; C0304
ATTTAPFL

SEQ ID NO: 23253 - protein, 10 aa, Homo sapiens
  AACR GENIE Results; CTNNB1_p.S45F; A6802
TTAPFLSGKG

SEQ ID NO: 23254 - protein, 8 aa, Homo sapiens
  AACR GENIE Results; CTNNB1_p.S45F; C1502
ATTTAPFL

SEQ ID NO: 23255 - protein, 8 aa, Homo sapiens
  AACR GENIE Results; CTNNB1_p.S45F; B4002
ATTTAPFL

SEQ ID NO: 23256 - protein, 9 aa, Homo sapiens
  AACR GENIE Results; CTNNB1_p.S45F; B3503
GATTTAPFL

SEQ ID NO: 23257 - protein, 9 aa, Homo sapiens
  AACR GENIE Results; CTNNB1_p.S45F; A1101
ATTTAPFLS

SEQ ID NO: 23258 - protein, 11 aa, Homo sapiens
  AACR GENIE Results; CTNNB1_p.S45F; B3801
IHSGATTTAPF

SEQ ID NO: 23259 - protein, 9 aa, Homo sapiens
  AACR GENIE Results; CTNNB1_p.S45F; B5701
TTAPFLSGK

SEQ ID NO: 23260 - protein, 8 aa, Homo sapiens
  AACR GENIE Results; CTNNB1_p.S45F; C0303
ATTTAPFL

SEQ ID NO: 23261 - protein, 10 aa, Homo sapiens
  AACR GENIE Results; CTNNB1_p.S45F; A6802
TTTAPFLSGK

SEQ ID NO: 23262 - protein, 11 aa, Homo sapiens
  AACR GENIE Results; CTNNB1_p.S45F; A0301
ATTTAPFLSGK

SEQ ID NO: 23263 - protein, 9 aa, Homo sapiens
  AACR GENIE Results; CTNNB1_p.S45F; A3101
TTAPFLSGK

SEQ ID NO: 23264 - protein, 9 aa, Homo sapiens
  AACR GENIE Results; CTNNB1_p.S45F; B3501
SGATTTAPF

SEQ ID NO: 23265 - protein, 9 aa, Homo sapiens
  AACR GENIE Results; CTNNB1_p.S45F; A3303
TTTAPFLSG

SEQ ID NO: 23266 - protein, 8 aa, Homo sapiens
  AACR GENIE Results; CTNNB1_p.S45F; C1601
ATTTAPFL

SEQ ID NO: 23267 - protein, 9 aa, Homo sapiens
  AACR GENIE Results; CTNNB1_p.S45F; A6801
TTTAPFLSG

SEQ ID NO: 23268 - protein, 9 aa, Homo sapiens
  AACR GENIE Results; CTNNB1_p.S45F; B1302
GATTTAPFL

SEQ ID NO: 23269 - protein, 9 aa, Homo sapiens
  AACR GENIE Results; CTNNB1_p.S45F; A3001
TTAPFLSGK

SEQ ID NO: 23270 - protein, 10 aa, Homo sapiens
  AACR GENIE Results; CTNNB1_p.S45F; A6801
TTAPFLSGKG

SEQ ID NO: 23271 - protein, 9 aa, Homo sapiens
  AACR GENIE Results; CTNNB1_p.S45F; B1501
SGATTTAPF

SEQ ID NO: 23272 - protein, 9 aa, Homo sapiens
  AACR GENIE Results; CTNNB1_p.S45F; A3001
GATTTAPFL

SEQ ID NO: 23273 - protein, 10 aa, Homo sapiens
  AACR GENIE Results; CTNNB1_p.S45F; A3303
TTTAPFLSGK

SEQ ID NO: 23274 - protein, 11 aa, Homo sapiens
  AACR GENIE Results; CTNNB1_p.S45F; A6801
ATTTAPFLSGK

SEQ ID NO: 23275 - protein, 10 aa, Homo sapiens
  AACR GENIE Results; CTNNB1_p.S45F; A1101
ATTTAPFLSG

SEQ ID NO: 23276 - protein, 10 aa, Homo sapiens
  AACR GENIE Results; CTNNB1_p.S45F; A1101
SGATTTAPFL

SEQ ID NO: 23277 - protein, 10 aa, Homo sapiens
  AACR GENIE Results; CTNNB1_p.S45F; A2902
TTAPFLSGKG

SEQ ID NO: 23278 - protein, 8 aa, Homo sapiens
  AACR GENIE Results; CTNNB1_p.S45F; C1701
ATTTAPFL

SEQ ID NO: 23279 - protein, 8 aa, Homo sapiens
  AACR GENIE Results; CTNNB1_p.S45F; B5701
ATTTAPFL

SEQ ID NO: 23280 - protein, 9 aa, Homo sapiens
  AACR GENIE Results; CTNNB1_p.S45F; A6802
ATTTAPFLS

SEQ ID NO: 23281 - protein, 9 aa, Homo sapiens
  AACR GENIE Results; CTNNB1_p.S45F; B2702
TTAPFLSGK

SEQ ID NO: 23282 - protein, 8 aa, Homo sapiens
  AACR GENIE Results; CTNNB1_p.S45F; A3001
ATTTAPFL

SEQ ID NO: 23283 - protein, 8 aa, Homo sapiens
  AACR GENIE Results; CTNNB1_p.S45F; B1302
ATTTAPFL

SEQ ID NO: 23284 - protein, 8 aa, Homo sapiens
  AACR GENIE Results; CTNNB1_p.S45F; B0702
ATTTAPFL

SEQ ID NO: 23285 - protein, 9 aa, Homo sapiens
  AACR GENIE Results; CTNNB1_p.S45F; A3101
TTTAPFLSG

SEQ ID NO: 23286 - protein, 10 aa, Homo sapiens
  AACR GENIE Results; CTNNB1_p.S45F; A1101
TTAPFLSGKG

SEQ ID NO: 23287 - protein, 10 aa, Homo sapiens
  AACR GENIE Results; CTNNB1_p.S45F; A2601
TTAPFLSGKG

SEQ ID NO: 23288 - protein, 9 aa, Homo sapiens
  AACR GENIE Results; CTNNB1_p.S45F; B4002
GATTTAPFL

SEQ ID NO: 23289 - protein, 9 aa, Homo sapiens
  AACR GENIE Results; CTNNB1_p.S45F; A1101
TTTAPFLSG

SEQ ID NO: 23290 - protein, 9 aa, Homo sapiens
  AACR GENIE Results; CTNNB1_p.S45F; B4001
GATTTAPFL

SEQ ID NO: 23291 - protein, 10 aa, Homo sapiens
  AACR GENIE Results; CTNNB1_p.S45F; A6801
SGATTTAPFL

SEQ ID NO: 23292 - protein, 10 aa, Homo sapiens
  AACR GENIE Results; CTNNB1_p.S45F; A6802
SGATTTAPFL

SEQ ID NO: 23293 - protein, 9 aa, Homo sapiens
  AACR GENIE Results; CTNNB1_p.S45F; B3503
SGATTTAPF

SEQ ID NO: 23294 - protein, 10 aa, Homo sapiens
  AACR GENIE Results; CTNNB1_p.S45F; A0301
TTAPFLSGKG

SEQ ID NO: 23295 - protein, 8 aa, Homo sapiens
  AACR GENIE Results; CTNNB1_p.S45F; A1101
ATTTAPFL

SEQ ID NO: 23296 - protein, 9 aa, Homo sapiens
  AACR GENIE Results; CTNNB1_p.S45F; A2601
TTAPFLSGK

SEQ ID NO: 23297 - protein, 10 aa, Homo sapiens
  AACR GENIE Results; CTNNB1_p.S45F; B0702
APFLSGKGNP

SEQ ID NO: 23298 - protein, 9 aa, Homo sapiens
  AACR GENIE Results; CTNNB1_p.S45F; B3901
SGATTTAPF

SEQ ID NO: 23299 - protein, 8 aa, Homo sapiens
  AACR GENIE Results; CTNNB1_p.S45F; B0702
APFLSGKG

SEQ ID NO: 23300 - protein, 9 aa, Homo sapiens
  AACR GENIE Results; CTNNB1_p.S45F; C1601
GATTTAPFL

SEQ ID NO: 23301 - protein, 10 aa, Homo sapiens
  AACR GENIE Results; CTNNB1_p.S45F; A3303
TTAPFLSGKG

SEQ ID NO: 23302 - protein, 9 aa, Homo sapiens
  AACR GENIE Results; CTNNB1_p.S45F; B2705
TTAPFLSGK

SEQ ID NO: 23303 - protein, 9 aa, Homo sapiens
  AACR GENIE Results; CTNNB1_p.S45F; A3301
TTAPFLSGK

SEQ ID NO: 23304 - protein, 8 aa, Homo sapiens
  AACR GENIE Results; CTNNB1_p.S45F; B5101
TAPFLSGK

SEQ ID NO: 23305 - protein, 9 aa, Homo sapiens
  AACR GENIE Results; CTNNB1_p.S45F; A0201
GATTTAPFL

SEQ ID NO: 23306 - protein, 9 aa, Homo sapiens
  AACR GENIE Results; CTNNB1_p.S45F; A0205
GATTTAPFL

SEQ ID NO: 23307 - protein, 11 aa, Homo sapiens
  AACR GENIE Results; CTNNB1_p.S45F; A3101
ATTTAPFLSGK

SEQ ID NO: 23308 - protein, 9 aa, Homo sapiens
  AACR GENIE Results; CTNNB1_p.S45F; A3001
TTTAPFLSG

SEQ ID NO: 23309 - protein, 8 aa, Homo sapiens
  AACR GENIE Results; CTNNB1_p.S45F; A3101
ATTTAPFL

SEQ ID NO: 23310 - protein, 9 aa, Homo sapiens
  AACR GENIE Results; CTNNB1_p.S45F; A6802
TTTAPFLSG

SEQ ID NO: 23311 - protein, 9 aa, Homo sapiens
  AACR GENIE Results; CTNNB1_p.S45P; A0301
TTAPPLSGK

SEQ ID NO: 23312 - protein, 9 aa, Homo sapiens
  AACR GENIE Results; CTNNB1_p.S45P; A1101
TTAPPLSGK

SEQ ID NO: 23313 - protein, 9 aa, Homo sapiens
  AACR GENIE Results; CTNNB1_p.S45P; A6801
TTAPPLSGK

SEQ ID NO: 23314 - protein, 11 aa, Homo sapiens
  AACR GENIE Results; CTNNB1_p.S45P; A1101
ATTTAPPLSGK

SEQ ID NO: 23315 - protein, 10 aa, Homo sapiens
  AACR GENIE Results; CTNNB1_p.S45P; A0301
TTTAPPLSGK

SEQ ID NO: 23316 - protein, 10 aa, Homo sapiens
  AACR GENIE Results; CTNNB1_p.S45P; A1101
TTTAPPLSGK

SEQ ID NO: 23317 - protein, 11 aa, Homo sapiens
  AACR GENIE Results; CTNNB1_p.S45P; A0301
ATTTAPPLSGK

SEQ ID NO: 23318 - protein, 10 aa, Homo sapiens
  AACR GENIE Results; CTNNB1_p.S45P; A6801
TTTAPPLSGK

SEQ ID NO: 23319 - protein, 10 aa, Homo sapiens
  AACR GENIE Results; CTNNB1_p.S45P; A1101
TTAPPLSGKG

SEQ ID NO: 23320 - protein, 9 aa, Homo sapiens
  AACR GENIE Results; CTNNB1_p.S45P; C0304
GATTTAPPL

SEQ ID NO: 23321 - protein, 9 aa, Homo sapiens
  AACR GENIE Results; CTNNB1_p.S45P; A3101
TTAPPLSGK

SEQ ID NO: 23322 - protein, 9 aa, Homo sapiens
  AACR GENIE Results; CTNNB1_p.S45P; B5701
TTAPPLSGK

SEQ ID NO: 23323 - protein, 9 aa, Homo sapiens
  AACR GENIE Results; CTNNB1_p.S45P; C0303
GATTTAPPL

SEQ ID NO: 23324 - protein, 10 aa, Homo sapiens
  AACR GENIE Results; CTNNB1_p.S45P; A6801
TTAPPLSGKG

SEQ ID NO: 23325 - protein, 9 aa, Homo sapiens
  AACR GENIE Results; CTNNB1_p.S45P; B3501
TTAPPLSGK

SEQ ID NO: 23326 - protein, 11 aa, Homo sapiens
  AACR GENIE Results; CTNNB1_p.S45P; A6801
ATTTAPPLSGK

SEQ ID NO: 23327 - protein, 8 aa, Homo sapiens
  AACR GENIE Results; CTNNB1_p.S45P; C0303
ATTTAPPL

SEQ ID NO: 23328 - protein, 8 aa, Homo sapiens
  AACR GENIE Results; CTNNB1_p.S45P; C0304
ATTTAPPL

SEQ ID NO: 23329 - protein, 10 aa, Homo sapiens
  AACR GENIE Results; CTNNB1_p.S45P; A0301
TTAPPLSGKG

SEQ ID NO: 23330 - protein, 8 aa, Homo sapiens
  AACR GENIE Results; CTNNB1_p.S45P; B0702
ATTTAPPL

SEQ ID NO: 23331 - protein, 9 aa, Homo sapiens
  AACR GENIE Results; CTNNB1_p.S45P; A1101
ATTTAPPLS

SEQ ID NO: 23332 - protein, 10 aa, Homo sapiens
  AACR GENIE Results; CTNNB1_p.S45P; A2902
TTAPPLSGKG

SEQ ID NO: 23333 - protein, 10 aa, Homo sapiens
  AACR GENIE Results; CTNNB1_p.S45P; A1101
ATTTAPPLSG

SEQ ID NO: 23334 - protein, 9 aa, Homo sapiens
  AACR GENIE Results; CTNNB1_p.S45P; A2601
TTAPPLSGK

SEQ ID NO: 23335 - protein, 9 aa, Homo sapiens
  AACR GENIE Results; CTNNB1_p.S45P; A6801
TTTAPPLSG

SEQ ID NO: 23336 - protein, 9 aa, Homo sapiens
  AACR GENIE Results; CTNNB1_p.S45P; B3501
GATTTAPPL

SEQ ID NO: 23337 - protein, 8 aa, Homo sapiens
  AACR GENIE Results; CTNNB1_p.S45P; B5101
TAPPLSGK

SEQ ID NO: 23338 - protein, 10 aa, Homo sapiens
  AACR GENIE Results; CTNNB1_p.S45P; A2601
TTAPPLSGKG

SEQ ID NO: 23339 - protein, 10 aa, Homo sapiens
  AACR GENIE Results; CTNNB1_p.S45P; A3101
TTTAPPLSGK

SEQ ID NO: 23340 - protein, 9 aa, Homo sapiens
  AACR GENIE Results; CTNNB1_p.S45P; B1501
TTAPPLSGK

SEQ ID NO: 23341 - protein, 9 aa, Homo sapiens
  AACR GENIE Results; CTNNB1_p.S45P; B1501
GATTTAPPL

SEQ ID NO: 23342 - protein, 10 aa, Homo sapiens
  AACR GENIE Results; CTNNB1_p.S45P; A1101
SGATTTAPPL

SEQ ID NO: 23343 - protein, 10 aa, Homo sapiens
  AACR GENIE Results; CTNNB1_p.S45P; A6801
SGATTTAPPL

SEQ ID NO: 23344 - protein, 9 aa, Homo sapiens
  AACR GENIE Results; CTNNB1_p.S45P; A6801
GATTTAPPL

SEQ ID NO: 23345 - protein, 9 aa, Homo sapiens
  AACR GENIE Results; CTNNB1_p.S45P; B0702
TTAPPLSGK

SEQ ID NO: 23346 - protein, 8 aa, Homo sapiens
  AACR GENIE Results; CTNNB1_p.S45P; C1601
ATTTAPPL

SEQ ID NO: 23347 - protein, 9 aa, Homo sapiens
  AACR GENIE Results; CTNNB1_p.S45P; A1101
GATTTAPPL

SEQ ID NO: 23348 - protein, 9 aa, Homo sapiens
  AACR GENIE Results; CTNNB1_p.S45P; A3101
TTTAPPLSG

SEQ ID NO: 23349 - protein, 9 aa, Homo sapiens
  AACR GENIE Results; CTNNB1_p.S45P; B0702
GATTTAPPL

SEQ ID NO: 23350 - protein, 8 aa, Homo sapiens
  AACR GENIE Results; CTNNB1_p.S45P; B1501
ATTTAPPL

SEQ ID NO: 23351 - protein, 9 aa, Homo sapiens
  AACR GENIE Results; CTNNB1_p.S45P; B4001
GATTTAPPL

SEQ ID NO: 23352 - protein, 9 aa, Homo sapiens
  AACR GENIE Results; CTNNB1_p.S45Y; A1101
TTAPYLSGK

SEQ ID NO: 23353 - protein, 9 aa, Homo sapiens
  AACR GENIE Results; CTNNB1_p.S45Y; A0301
TTAPYLSGK

SEQ ID NO: 23354 - protein, 11 aa, Homo sapiens
  AACR GENIE Results; CTNNB1_p.S45Y; A1101
ATTTAPYLSGK

SEQ ID NO: 23355 - protein, 9 aa, Homo sapiens
  AACR GENIE Results; CTNNB1_p.S45Y; C0304
GATTTAPYL

SEQ ID NO: 23356 - protein, 9 aa, Homo sapiens
  AACR GENIE Results; CTNNB1_p.S45Y; B3501
SGATTTAPY

SEQ ID NO: 23357 - protein, 10 aa, Homo sapiens
  AACR GENIE Results; CTNNB1_p.S45Y; A1101
TTTAPYLSGK

SEQ ID NO: 23358 - protein, 8 aa, Homo sapiens
  AACR GENIE Results; CTNNB1_p.S45Y; C0304
ATTTAPYL

SEQ ID NO: 23359 - protein, 10 aa, Homo sapiens
  AACR GENIE Results; CTNNB1_p.S45Y; A0301
TTTAPYLSGK

SEQ ID NO: 23360 - protein, 11 aa, Homo sapiens
  AACR GENIE Results; CTNNB1_p.S45Y; A0301
ATTTAPYLSGK

SEQ ID NO: 23361 - protein, 10 aa, Homo sapiens
  AACR GENIE Results; CTNNB1_p.S45Y; A1101
TTAPYLSGKG

SEQ ID NO: 23362 - protein, 8 aa, Homo sapiens
  AACR GENIE Results; CTNNB1_p.S45Y; B0702
ATTTAPYL

SEQ ID NO: 23363 - protein, 10 aa, Homo sapiens
  AACR GENIE Results; CTNNB1_p.S45Y; A0301
TTAPYLSGKG

SEQ ID NO: 23364 - protein, 9 aa, Homo sapiens
  AACR GENIE Results; CTNNB1_p.S45Y; A1101
ATTTAPYLS

SEQ ID NO: 23365 - protein, 10 aa, Homo sapiens
  AACR GENIE Results; CTNNB1_p.S45Y; A1101
ATTTAPYLSG

SEQ ID NO: 23366 - protein, 9 aa, Homo sapiens
  AACR GENIE Results; CTNNB1_p.S45Y; A0201
GATTTAPYL

SEQ ID NO: 23367 - protein, 10 aa, Homo sapiens
  AACR GENIE Results; CTNNB1_p.S45Y; A1101
SGATTTAPYL

SEQ ID NO: 23368 - protein, 10 aa, Homo sapiens
  AACR GENIE Results; CTNNB1_p.S45Y; B0702
APYLSGKGNP

SEQ ID NO: 23369 - protein, 8 aa, Homo sapiens
  AACR GENIE Results; CTNNB1_p.S45Y; A1101
ATTTAPYL

SEQ ID NO: 23370 - protein, 8 aa, Homo sapiens
  AACR GENIE Results; CTNNB1_p.S45Y; B0702
APYLSGKG

SEQ ID NO: 23371 - protein, 9 aa, Homo sapiens
  AACR GENIE Results; CTNNB1_p.S45Y; B3501
GATTTAPYL

SEQ ID NO: 23372 - protein, 9 aa, Homo sapiens
  AACR GENIE Results; CTNNB1_p.S45Y; B3501
TTAPYLSGK

SEQ ID NO: 23373 - protein, 9 aa, Homo sapiens
  AACR GENIE Results; CTNNB1_p.S45Y; A1101
GATTTAPYL

SEQ ID NO: 23374 - protein, 11 aa, Homo sapiens
  AACR GENIE Results; CTNNB1_p.S45Y; A1101
SGATTTAPYLS

SEQ ID NO: 23375 - protein, 10 aa, Homo sapiens
  AACR GENIE Results; CTNNB1_p.S45Y; B3501
HSGATTTAPY

SEQ ID NO: 23376 - protein, 8 aa, Homo sapiens
  AACR GENIE Results; CTNNB1_p.S45Y; A1101
TAPYLSGK

SEQ ID NO: 23377 - protein, 9 aa, Homo sapiens
  AACR GENIE Results; CTNNB1_p.S45Y; A1101
SGATTTAPY

SEQ ID NO: 23378 - protein, 9 aa, Homo sapiens
  AACR GENIE Results; CTNNB1_p.T41A; A0301
ATAPSLSGK

SEQ ID NO: 23379 - protein, 9 aa, Homo sapiens
  AACR GENIE Results; CTNNB1_p.T41A; A1101
ATAPSLSGK

SEQ ID NO: 23380 - protein, 11 aa, Homo sapiens
  AACR GENIE Results; CTNNB1_p.T41A; A1101
ATATAPSLSGK

SEQ ID NO: 23381 - protein, 11 aa, Homo sapiens
  AACR GENIE Results; CTNNB1_p.T41A; A0301
ATATAPSLSGK

SEQ ID NO: 23382 - protein, 9 aa, Homo sapiens
  AACR GENIE Results; CTNNB1_p.T41A; C0304
GATATAPSL

SEQ ID NO: 23383 - protein, 9 aa, Homo sapiens
  AACR GENIE Results; CTNNB1_p.T41A; C0303
GATATAPSL

SEQ ID NO: 23384 - protein, 9 aa, Homo sapiens
  AACR GENIE Results; CTNNB1_p.T41A; B3503
GATATAPSL

SEQ ID NO: 23385 - protein, 9 aa, Homo sapiens
  AACR GENIE Results; CTNNB1_p.T41A; B3901
IHSGATATA

SEQ ID NO: 23386 - protein, 10 aa, Homo sapiens
  AACR GENIE Results; CTNNB1_p.T41A; A6801
TATAPSLSGK

SEQ ID NO: 23387 - protein, 9 aa, Homo sapiens
  AACR GENIE Results; CTNNB1_p.T41A; B5801
GATATAPSL

SEQ ID NO: 23388 - protein, 11 aa, Homo sapiens
  AACR GENIE Results; CTNNB1_p.T41A; A6801
ATATAPSLSGK

SEQ ID NO: 23389 - protein, 8 aa, Homo sapiens
  AACR GENIE Results; CTNNB1_p.T41A; B5801
ATATAPSL

SEQ ID NO: 23390 - protein, 8 aa, Homo sapiens
  AACR GENIE Results; CTNNB1_p.T41A; C0303
ATATAPSL

SEQ ID NO: 23391 - protein, 9 aa, Homo sapiens
  AACR GENIE Results; CTNNB1_p.T41A; A6801
ATAPSLSGK

SEQ ID NO: 23392 - protein, 10 aa, Homo sapiens
  AACR GENIE Results; CTNNB1_p.T41A; B3901
IHSGATATAP

SEQ ID NO: 23393 - protein, 8 aa, Homo sapiens
  AACR GENIE Results; CTNNB1_p.T41A; C0304
ATATAPSL

SEQ ID NO: 23394 - protein, 8 aa, Homo sapiens
  AACR GENIE Results; CTNNB1_p.T41A; B3901
ATATAPSL

SEQ ID NO: 23395 - protein, 8 aa, Homo sapiens
  AACR GENIE Results; CTNNB1_p.T41A; B4002
ATATAPSL

SEQ ID NO: 23396 - protein, 10 aa, Homo sapiens
  AACR GENIE Results; CTNNB1_p.T41A; A1101
ATATAPSLSG

SEQ ID NO: 23397 - protein, 9 aa, Homo sapiens
  AACR GENIE Results; CTNNB1_p.T41A; B4002
GATATAPSL

SEQ ID NO: 23398 - protein, 9 aa, Homo sapiens
  AACR GENIE Results; CTNNB1_p.T41A; B1302
GATATAPSL

SEQ ID NO: 23399 - protein, 8 aa, Homo sapiens
  AACR GENIE Results; CTNNB1_p.T41A; C1601
ATATAPSL

SEQ ID NO: 23400 - protein, 11 aa, Homo sapiens
  AACR GENIE Results; CTNNB1_p.T41A; B2702
ATATAPSLSGK

SEQ ID NO: 23401 - protein, 9 aa, Homo sapiens
  AACR GENIE Results; CTNNB1_p.T41A; B3801
IHSGATATA

SEQ ID NO: 23402 - protein, 9 aa, Homo sapiens
  AACR GENIE Results; CTNNB1_p.T41A; A3001
GATATAPSL

SEQ ID NO: 23403 - protein, 10 aa, Homo sapiens
  AACR GENIE Results; CTNNB1_p.T41A; A1101
ATAPSLSGKG

SEQ ID NO: 23404 - protein, 8 aa, Homo sapiens
  AACR GENIE Results; CTNNB1_p.T41A; B3901
IHSGATAT

SEQ ID NO: 23405 - protein, 9 aa, Homo sapiens
  AACR GENIE Results; CTNNB1_p.T41A; A0205
SGIHSGATA

SEQ ID NO: 23406 - protein, 10 aa, Homo sapiens
  AACR GENIE Results; CTNNB1_p.T41A; B5001
GIHSGATATA

SEQ ID NO: 23407 - protein, 9 aa, Homo sapiens
  AACR GENIE Results; CTNNB1_p.T41A; A1101
ATATAPSLS

SEQ ID NO: 23408 - protein, 9 aa, Homo sapiens
  AACR GENIE Results; CTNNB1_p.T41A; C1701
GATATAPSL

SEQ ID NO: 23409 - protein, 9 aa, Homo sapiens
  AACR GENIE Results; CTNNB1_p.T41A; B3501
GATATAPSL

SEQ ID NO: 23410 - protein, 10 aa, Homo sapiens
  AACR GENIE Results; CTNNB1_p.T41A; A0301
TATAPSLSGK

SEQ ID NO: 23411 - protein, 8 aa, Homo sapiens
  AACR GENIE Results; CTNNB1_p.T41A; A3001
ATATAPSL

SEQ ID NO: 23412 - protein, 8 aa, Homo sapiens
  AACR GENIE Results; CTNNB1_p.T41A; B1501
ATATAPSL

SEQ ID NO: 23413 - protein, 8 aa, Homo sapiens
  AACR GENIE Results; CTNNB1_p.T41A; B0702
ATATAPSL

SEQ ID NO: 23414 - protein, 10 aa, Homo sapiens
  AACR GENIE Results; CTNNB1_p.T41A; A1101
TATAPSLSGK

SEQ ID NO: 23415 - protein, 10 aa, Homo sapiens
  AACR GENIE Results; CTNNB1_p.T41A; A0205
GIHSGATATA

SEQ ID NO: 23416 - protein, 10 aa, Homo sapiens
  AACR GENIE Results; CTNNB1_p.T41A; B2702
TATAPSLSGK

SEQ ID NO: 23417 - protein, 9 aa, Homo sapiens
  AACR GENIE Results; CTNNB1_p.T41A; B0702
GATATAPSL

SEQ ID NO: 23418 - protein, 9 aa, Homo sapiens
  AACR GENIE Results; CTNNB1_p.T41A; A3001
ATAPSLSGK

SEQ ID NO: 23419 - protein, 9 aa, Homo sapiens
  AACR GENIE Results; CTNNB1_p.T41A; B3502
GATATAPSL

SEQ ID NO: 23420 - protein, 10 aa, Homo sapiens
  AACR GENIE Results; CTNNB1_p.T41A; A3303
TATAPSLSGK

SEQ ID NO: 23421 - protein, 9 aa, Homo sapiens
  AACR GENIE Results; CTNNB1_p.T41A; A3101
ATAPSLSGK

SEQ ID NO: 23422 - protein, 9 aa, Homo sapiens
  AACR GENIE Results; CTNNB1_p.T41A; C1601
GATATAPSL

SEQ ID NO: 23423 - protein, 9 aa, Homo sapiens
  AACR GENIE Results; CTNNB1_p.T41A; B1501
GATATAPSL

SEQ ID NO: 23424 - protein, 10 aa, Homo sapiens
  AACR GENIE Results; CTNNB1_p.T41A; B4002
SGATATAPSL

SEQ ID NO: 23425 - protein, 9 aa, Homo sapiens
  AACR GENIE Results; CTNNB1_p.T41A; B1501
GIHSGATAT

SEQ ID NO: 23426 - protein, 9 aa, Homo sapiens
  AACR GENIE Results; CTNNB1_p.T41A; B4001
GATATAPSL

SEQ ID NO: 23427 - protein, 9 aa, Homo sapiens
  AACR GENIE Results; CTNNB1_p.T41A; B3901
GATATAPSL

SEQ ID NO: 23428 - protein, 8 aa, Homo sapiens
  AACR GENIE Results; CTNNB1_p.T41A; B1302
ATATAPSL

SEQ ID NO: 23429 - protein, 8 aa, Homo sapiens
  AACR GENIE Results; CTNNB1_p.T41A; C1402
ATATAPSL

SEQ ID NO: 23430 - protein, 11 aa, Homo sapiens
  AACR GENIE Results; CTNNB1_p.T41A; A3101
ATATAPSLSGK

SEQ ID NO: 23431 - protein, 10 aa, Homo sapiens
  AACR GENIE Results; CTNNB1_p.T41A; A0301
ATATAPSLSG

SEQ ID NO: 23432 - protein, 10 aa, Homo sapiens
  AACR GENIE Results; CTNNB1_p.T41A; B1501
GIHSGATATA

SEQ ID NO: 23433 - protein, 8 aa, Homo sapiens
  AACR GENIE Results; CTNNB1_p.T41A; B4001
ATATAPSL

SEQ ID NO: 23434 - protein, 9 aa, Homo sapiens
  AACR GENIE Results; CTNNB1_p.T41A; A0205
GATATAPSL

SEQ ID NO: 23435 - protein, 10 aa, Homo sapiens
  AACR GENIE Results; CTNNB1_p.T41A; A6802
TATAPSLSGK

SEQ ID NO: 23436 - protein, 9 aa, Homo sapiens
  AACR GENIE Results; CTNNB1_p.T41A; B3501
TATAPSLSG

SEQ ID NO: 23437 - protein, 9 aa, Homo sapiens
  AACR GENIE Results; CTNNB1_p.T41A; A0301
ATATAPSLS

SEQ ID NO: 23438 - protein, 8 aa, Homo sapiens
  AACR GENIE Results; CTNNB1_p.T41A; C0102
ATATAPSL

SEQ ID NO: 23439 - protein, 9 aa, Homo sapiens
  AACR GENIE Results; CTNNB1_p.T41A; B5001
SGIHSGATA

SEQ ID NO: 23440 - protein, 11 aa, Homo sapiens
  AACR GENIE Results; CTNNB1_p.T41A; A0205
SGIHSGATATA

SEQ ID NO: 23441 - protein, 8 aa, Homo sapiens
  AACR GENIE Results; CTNNB1_p.T41A; B3701
ATATAPSL

SEQ ID NO: 23442 - protein, 9 aa, Homo sapiens
  AACR GENIE Results; CTNNB1_p.T41A; A0201
GATATAPSL

SEQ ID NO: 23443 - protein, 8 aa, Homo sapiens
  AACR GENIE Results; CTNNB1_p.T41A; B5701
ATATAPSL

SEQ ID NO: 23444 - protein, 9 aa, Homo sapiens
  AACR GENIE Results; CTNNB1_p.T41A; B0702
TATAPSLSG

SEQ ID NO: 23445 - protein, 9 aa, Homo sapiens
  AACR GENIE Results; CTNNB1_p.T41A; B2705
ATAPSLSGK

SEQ ID NO: 23446 - protein, 10 aa, Homo sapiens
  AACR GENIE Results; CTNNB1_p.T41A; A0301
ATAPSLSGKG

SEQ ID NO: 23447 - protein, 9 aa, Homo sapiens
  AACR GENIE Results; CTNNB1_p.T41A; A3001
TATAPSLSG

SEQ ID NO: 23448 - protein, 8 aa, Homo sapiens
  AACR GENIE Results; CTNNB1_p.T41A; C1502
ATATAPSL

SEQ ID NO: 23449 - protein, 9 aa, Homo sapiens
  AACR GENIE Results; CTNNB1_p.T41A; B1302
GIHSGATAT

SEQ ID NO: 23450 - protein, 9 aa, Homo sapiens
  AACR GENIE Results; CTNNB1_p.T41A; A6802
ATAPSLSGK

SEQ ID NO: 23451 - protein, 9 aa, Homo sapiens
  AACR GENIE Results; CTNNB1_p.T41A; A0201
ATAPSLSGK

SEQ ID NO: 23452 - protein, 11 aa, Homo sapiens
  AACR GENIE Results; CTNNB1_p.T41A; A6801
TATAPSLSGKG

SEQ ID NO: 23453 - protein, 10 aa, Homo sapiens
  AACR GENIE Results; CTNNB1_p.T41A; A2601
ATAPSLSGKG

SEQ ID NO: 23454 - protein, 10 aa, Homo sapiens
  AACR GENIE Results; CTNNB1_p.T41A; B1302
GIHSGATATA

SEQ ID NO: 23455 - protein, 9 aa, Homo sapiens
  AACR GENIE Results; CTNNB1_p.T41A; B5701
ATAPSLSGK

SEQ ID NO: 23456 - protein, 8 aa, Homo sapiens
  AACR GENIE Results; CTNNB1_p.T41A; C1701
ATATAPSL

SEQ ID NO: 23457 - protein, 9 aa, Homo sapiens
  AACR GENIE Results; CTNNB1_p.T41A; C1203
GATATAPSL

SEQ ID NO: 23458 - protein, 11 aa, Homo sapiens
  AACR GENIE Results; CTNNB1_p.T41A; A6802
ATATAPSLSGK

SEQ ID NO: 23459 - protein, 11 aa, Homo sapiens
  AACR GENIE Results; CUX1_p.T748I; B1501
SISPMPTVSSY

SEQ ID NO: 23460 - protein, 9 aa, Homo sapiens
  AACR GENIE Results; CUX1_p.T748I; A0201
ILTPKLLSI

SEQ ID NO: 23461 - protein, 11 aa, Homo sapiens
  AACR GENIE Results; CUX1_p.T748I; A0201
KLLSISPMPTV

SEQ ID NO: 23462 - protein, 10 aa, Homo sapiens
  AACR GENIE Results; CUX1_p.T748I; B1501
ISPMPTVSSY

SEQ ID NO: 23463 - protein, 9 aa, Homo sapiens
  AACR GENIE Results; CUX1_p.T748I; B5101
LSISPMPTV

SEQ ID NO: 23464 - protein, 10 aa, Homo sapiens
  AACR GENIE Results; CUX1_p.T748I; A0201
KLLSISPMPT

SEQ ID NO: 23465 - protein, 9 aa, Homo sapiens
  AACR GENIE Results; CUX1_p.V545I; B1302
SQSESAGSI

SEQ ID NO: 23466 - protein, 9 aa, Homo sapiens
  AACR GENIE Results; CUX1_p.V545I; B1501
GSISEGEEM

SEQ ID NO: 23467 - protein, 11 aa, Homo sapiens
  AACR GENIE Results; CUX1_p.V545I; B0702
SPSQSESAGSI

SEQ ID NO: 23468 - protein, 10 aa, Homo sapiens
  AACR GENIE Results; DAXX_p.R299Q; B4002
VEKAAAQHSL

SEQ ID NO: 23469 - protein, 10 aa, Homo sapiens
  AACR GENIE Results; DAXX_p.R299Q; A3001
VEKAAAQHSL

SEQ ID NO: 23470 - protein, 9 aa, Homo sapiens
  AACR GENIE Results; DAXX_p.R299Q; A3101
AQHSLGLPR

SEQ ID NO: 23471 - protein, 10 aa, Homo sapiens
  AACR GENIE Results; DAXX_p.R299Q; A1101
AAQHSLGLPR

SEQ ID NO: 23472 - protein, 10 aa, Homo sapiens
  AACR GENIE Results; DAXX_p.R299Q; B2702
AAQHSLGLPR

SEQ ID NO: 23473 - protein, 9 aa, Homo sapiens
  AACR GENIE Results; DAXX_p.R299Q; C1602
AAAQHSLGL

SEQ ID NO: 23474 - protein, 9 aa, Homo sapiens
  AACR GENIE Results; DAXX_p.R299Q; B3901
EKAAAQHSL

SEQ ID NO: 23475 - protein, 10 aa, Homo sapiens
  AACR GENIE Results; DAXX_p.R299Q; B4001
VEKAAAQHSL

SEQ ID NO: 23476 - protein, 9 aa, Homo sapiens
  AACR GENIE Results; DAXX_p.R299Q; C0304
AAAQHSLGL

SEQ ID NO: 23477 - protein, 9 aa, Homo sapiens
  AACR GENIE Results; DAXX_p.R299Q; A1101
AQHSLGLPR

SEQ ID NO: 23478 - protein, 9 aa, Homo sapiens
  AACR GENIE Results; DAXX_p.R299Q; C1502
AAAQHSLGL

SEQ ID NO: 23479 - protein, 10 aa, Homo sapiens
  AACR GENIE Results; DAXX_p.R299Q; A3101
AAQHSLGLPR

SEQ ID NO: 23480 - protein, 9 aa, Homo sapiens
  AACR GENIE Results; DAXX_p.R299Q; A0301
AQHSLGLPR

SEQ ID NO: 23481 - protein, 10 aa, Homo sapiens
  AACR GENIE Results; DDB2_p.Q265K; A1101
ATASVDKTVK

SEQ ID NO: 23482 - protein, 8 aa, Homo sapiens
  AACR GENIE Results; DDB2_p.Q265K; C0501
SVDKTVKI

SEQ ID NO: 23483 - protein, 10 aa, Homo sapiens
  AACR GENIE Results; DDB2_p.Q265K; A0301
ATASVDKTVK

SEQ ID NO: 23484 - protein, 9 aa, Homo sapiens
  AACR GENIE Results; DDB2_p.Q265K; A0301
FLATASVDK

SEQ ID NO: 23485 - protein, 8 aa, Homo sapiens
  AACR GENIE Results; DDR2_p.I488M; B1501
YQEPSRLM

SEQ ID NO: 23486 - protein, 8 aa, Homo sapiens
  AACR GENIE Results; DDR2_p.L232F; C0501
FTDGVSGL

SEQ ID NO: 23487 - protein, 9 aa, Homo sapiens
  AACR GENIE Results; DDR2_p.L232F; A0201
GLGQFTDGV

SEQ ID NO: 23488 - protein, 10 aa, Homo sapiens
  AACR GENIE Results; DDR2_p.L232F; A0101
YSMTEGLGQF

SEQ ID NO: 23489 - protein, 8 aa, Homo sapiens
  AACR GENIE Results; DDR2_p.L232F; C0401
FTDGVSGL

SEQ ID NO: 23490 - protein, 11 aa, Homo sapiens
  AACR GENIE Results; DDR2_p.L232F; C0501
FTDGVSGLDDF

SEQ ID NO: 23491 - protein, 11 aa, Homo sapiens
  AACR GENIE Results; DDR2_p.L232F; A0101
FTDGVSGLDDF

SEQ ID NO: 23492 - protein, 9 aa, Homo sapiens
  AACR GENIE Results; DDR2_p.L232F; A0201
SMTEGLGQF

SEQ ID NO: 23493 - protein, 10 aa, Homo sapiens
  AACR GENIE Results; DDR2_p.L232F; A1101
YSMTEGLGQF

SEQ ID NO: 23494 - protein, 10 aa, Homo sapiens
  AACR GENIE Results; DDR2_p.L232F; A0201
SMTEGLGQFT

SEQ ID NO: 23495 - protein, 10 aa, Homo sapiens
  AACR GENIE Results; DDR2_p.L232F; A0201
GQFTDGVSGL

SEQ ID NO: 23496 - protein, 9 aa, Homo sapiens
  AACR GENIE Results; DDR2_p.L232F; A2402
SMTEGLGQF

SEQ ID NO: 23497 - protein, 8 aa, Homo sapiens
  AACR GENIE Results; DDR2_p.L232F; C0401
MTEGLGQF

SEQ ID NO: 23498 - protein, 8 aa, Homo sapiens
  AACR GENIE Results; DDR2_p.L232F; C0304
FTDGVSGL

SEQ ID NO: 23499 - protein, 8 aa, Homo sapiens
  AACR GENIE Results; DDR2_p.L232F; C0501
MTEGLGQF

SEQ ID NO: 23500 - protein, 9 aa, Homo sapiens
  AACR GENIE Results; DDR2_p.R668H; A0301
GDLNQFLSH

SEQ ID NO: 23501 - protein, 9 aa, Homo sapiens
  AACR GENIE Results; DDR2_p.R668H; A1101
GDLNQFLSH

SEQ ID NO: 23502 - protein, 9 aa, Homo sapiens
  AACR GENIE Results; DDR2_p.V250L; A0201
HLWPGYDYV

SEQ ID NO: 23503 - protein, 10 aa, Homo sapiens
  AACR GENIE Results; DICER1_p.K228N; A1101
KIQKLENILK

SEQ ID NO: 23504 - protein, 10 aa, Homo sapiens
  AACR GENIE Results; DICER1_p.K228N; A0301
KIQKLENILK

SEQ ID NO: 23505 - protein, 9 aa, Homo sapiens
  AACR GENIE Results; DICER1_p.P762S; C0602
SRPDQPCYL

SEQ ID NO: 23506 - protein, 9 aa, Homo sapiens
  AACR GENIE Results; DICER1_p.P762S; B1501
YSRPDQPCY

SEQ ID NO: 23507 - protein, 9 aa, Homo sapiens
  AACR GENIE Results; DICER1_p.P762S; C0202
YSRPDQPCY

SEQ ID NO: 23508 - protein, 9 aa, Homo sapiens
  AACR GENIE Results; DICER1_p.P762S; A0101
YSRPDQPCY

SEQ ID NO: 23509 - protein, 9 aa, Homo sapiens
  AACR GENIE Results; DICER1_p.P762S; C1601
YSRPDQPCY

SEQ ID NO: 23510 - protein, 9 aa, Homo sapiens
  AACR GENIE Results; DICER1_p.P762S; A2601
YSRPDQPCY

SEQ ID NO: 23511 - protein, 9 aa, Homo sapiens
  AACR GENIE Results; DICER1_p.P762S; B3501
YSRPDQPCY

SEQ ID NO: 23512 - protein, 9 aa, Homo sapiens
  AACR GENIE Results; DIS3_p.D488Y; A0201
GCTDIDYAL

SEQ ID NO: 23513 - protein, 8 aa, Homo sapiens
  AACR GENIE Results; DIS3_p.G188V; B1801
IEEVIPAF

SEQ ID NO: 23514 - protein, 11 aa, Homo sapiens
  AACR GENIE Results; DIS3_p.G188V; A2601
EVIPAFTCEEY

SEQ ID NO: 23515 - protein, 10 aa, Homo sapiens
  AACR GENIE Results; DIS3_p.G188V; B1501
VIPAFTCEEY

SEQ ID NO: 23516 - protein, 9 aa, Homo sapiens
  AACR GENIE Results; DIS3_p.G188V; B1501
AIEEVIPAF

SEQ ID NO: 23517 - protein, 10 aa, Homo sapiens
  AACR GENIE Results; DIS3_p.G188V; B5701
KAIEEVIPAF

SEQ ID NO: 23518 - protein, 10 aa, Homo sapiens
  AACR GENIE Results; DIS3_p.G188V; B3501
KAIEEVIPAF

SEQ ID NO: 23519 - protein, 9 aa, Homo sapiens
  AACR GENIE Results; DIS3_p.G188V; A2601
AIEEVIPAF

SEQ ID NO: 23520 - protein, 9 aa, Homo sapiens
  AACR GENIE Results; DIS3_p.G188V; B3501
AIEEVIPAF

SEQ ID NO: 23521 - protein, 9 aa, Homo sapiens
  AACR GENIE Results; DIS3_p.G188V; B4001
KEKAIEEVI

SEQ ID NO: 23522 - protein, 10 aa, Homo sapiens
  AACR GENIE Results; DIS3_p.G188V; B1501
KAIEEVIPAF

SEQ ID NO: 23523 - protein, 9 aa, Homo sapiens
  AACR GENIE Results; DIS3_p.K535N; B3901
NRIDMVPEL

SEQ ID NO: 23524 - protein, 9 aa, Homo sapiens
  AACR GENIE Results; DIS3_p.K535N; B1401
NRIDMVPEL

SEQ ID NO: 23525 - protein, 9 aa, Homo sapiens
  AACR GENIE Results; DIS3_p.K535N; C0602
NRIDMVPEL

SEQ ID NO: 23526 - protein, 9 aa, Homo sapiens
  AACR GENIE Results; DIS3_p.K535N; B2705
NRIDMVPEL

SEQ ID NO: 23527 - protein, 9 aa, Homo sapiens
  AACR GENIE Results; DIS3_p.K535N; B3801
NRIDMVPEL

SEQ ID NO: 23528 - protein, 9 aa, Homo sapiens
  AACR GENIE Results; DIS3_p.K535N; A6801
TTVYLCENR

SEQ ID NO: 23529 - protein, 9 aa, Homo sapiens
  AACR GENIE Results; DIS3_p.K535N; C0702
NRIDMVPEL

SEQ ID NO: 23530 - protein, 9 aa, Homo sapiens
  AACR GENIE Results; DIS3_p.K535N; A3303
TTVYLCENR

SEQ ID NO: 23531 - protein, 9 aa, Homo sapiens
  AACR GENIE Results; DIS3_p.K535N; B3503
NRIDMVPEL

SEQ ID NO: 23532 - protein, 9 aa, Homo sapiens
  AACR GENIE Results; DNMT1_p.R1401W; B5701
QSWFQRQLW

SEQ ID NO: 23533 - protein, 11 aa, Homo sapiens
  AACR GENIE Results; DNMT3A_p.I780T; A0201
VMTDAKEVSAA

SEQ ID NO: 23534 - protein, 10 aa, Homo sapiens
  AACR GENIE Results; DNMT3A_p.I780T; A0201
VMTDAKEVSA

SEQ ID NO: 23535 - protein, 9 aa, Homo sapiens
  AACR GENIE Results; DNMT3A_p.I780T; A0201
FLESNPVMT

SEQ ID NO: 23536 - protein, 8 aa, Homo sapiens
  AACR GENIE Results; DNMT3A_p.I780T; A0201
VMTDAKEV

SEQ ID NO: 23537 - protein, 10 aa, Homo sapiens
  AACR GENIE Results; DNMT3A_p.I780T; B0801
VMTDAKEVSA

SEQ ID NO: 23538 - protein, 10 aa, Homo sapiens
  AACR GENIE Results; DNMT3A_p.P904L; A0201
ALLKEYFACV

SEQ ID NO: 23539 - protein, 9 aa, Homo sapiens
  AACR GENIE Results; DNMT3A_p.P904L; A2402
LFALLKEYF

SEQ ID NO: 23540 - protein, 9 aa, Homo sapiens
  AACR GENIE Results; DNMT3A_p.P904L; A0201
LLKEYFACV

SEQ ID NO: 23541 - protein, 8 aa, Homo sapiens
  AACR GENIE Results; DNMT3A_p.P904L; C1601
FALLKEYF

SEQ ID NO: 23542 - protein, 9 aa, Homo sapiens
  AACR GENIE Results; DNMT3A_p.P904L; A0201
ALLKEYFAC

SEQ ID NO: 23543 - protein, 9 aa, Homo sapiens
  AACR GENIE Results; DNMT3A_p.R736C; A0301
CLLHDARPK

SEQ ID NO: 23544 - protein, 9 aa, Homo sapiens
  AACR GENIE Results; DNMT3A_p.R742P; A0301
RLLHDAPPK

SEQ ID NO: 23545 - protein, 9 aa, Homo sapiens
  AACR GENIE Results; DNMT3A_p.R742P; A1101
RLLHDAPPK

SEQ ID NO: 23546 - protein, 11 aa, Homo sapiens
  AACR GENIE Results; DNMT3A_p.R742P; B3501
APPKEGDDRPF

SEQ ID NO: 23547 - protein, 9 aa, Homo sapiens
  AACR GENIE Results; DNMT3A_p.R882C; B4002
TDVSNMSCL

SEQ ID NO: 23548 - protein, 10 aa, Homo sapiens
  AACR GENIE Results; DNMT3A_p.R882C; A6801
DVSNMSCLAR

SEQ ID NO: 23549 - protein, 9 aa, Homo sapiens
  AACR GENIE Results; DNMT3A_p.R882C; A0101
YTDVSNMSC

SEQ ID NO: 23550 - protein, 9 aa, Homo sapiens
  AACR GENIE Results; DNMT3A_p.R882C; C0802
YTDVSNMSC

SEQ ID NO: 23551 - protein, 10 aa, Homo sapiens
  AACR GENIE Results; DNMT3A_p.R882C; C0802
YTDVSNMSCL

SEQ ID NO: 23552 - protein, 9 aa, Homo sapiens
  AACR GENIE Results; DNMT3A_p.R882C; B3901
TDVSNMSCL

SEQ ID NO: 23553 - protein, 9 aa, Homo sapiens
  AACR GENIE Results; DNMT3A_p.R882C; A3101
VSNMSCLAR

SEQ ID NO: 23554 - protein, 9 aa, Homo sapiens
  AACR GENIE Results; DNMT3A_p.R882C; B5801
YTDVSNMSC

SEQ ID NO: 23555 - protein, 10 aa, Homo sapiens
  AACR GENIE Results; DNMT3A_p.R882C; A3303
DVSNMSCLAR

SEQ ID NO: 23556 - protein, 9 aa, Homo sapiens
  AACR GENIE Results; DNMT3A_p.R882C; A1101
VSNMSCLAR

SEQ ID NO: 23557 - protein, 10 aa, Homo sapiens
  AACR GENIE Results; DNMT3A_p.R882H; A6801
DVSNMSHLAR

SEQ ID NO: 23558 - protein, 9 aa, Homo sapiens
  AACR GENIE Results; DNMT3A_p.R882H; A0101
YTDVSNMSH

SEQ ID NO: 23559 - protein, 10 aa, Homo sapiens
  AACR GENIE Results; DNMT3A_p.R882H; C0802
YTDVSNMSHL

SEQ ID NO: 23560 - protein, 10 aa, Homo sapiens
  AACR GENIE Results; DNMT3A_p.R882H; A3303
DVSNMSHLAR

SEQ ID NO: 23561 - protein, 9 aa, Homo sapiens
  AACR GENIE Results; DNMT3A_p.R882H; B4002
TDVSNMSHL

SEQ ID NO: 23562 - protein, 9 aa, Homo sapiens
  AACR GENIE Results; DNMT3A_p.R882H; A3101
VSNMSHLAR

SEQ ID NO: 23563 - protein, 11 aa, Homo sapiens
  AACR GENIE Results; DNMT3A_p.R882H; A0101
YTDVSNMSHLA

SEQ ID NO: 23564 - protein, 8 aa, Homo sapiens
  AACR GENIE Results; DNMT3A_p.R882H; A3303
SNMSHLAR

SEQ ID NO: 23565 - protein, 8 aa, Homo sapiens
  AACR GENIE Results; DNMT3A_p.R882H; A3303
MSHLARQR

SEQ ID NO: 23566 - protein, 8 aa, Homo sapiens
  AACR GENIE Results; DNMT3A_p.R882H; A2601
DVSNMSHL

SEQ ID NO: 23567 - protein, 9 aa, Homo sapiens
  AACR GENIE Results; DNMT3A_p.R882H; A6801
DVSNMSHLA

SEQ ID NO: 23568 - protein, 10 aa, Homo sapiens
  AACR GENIE Results; DNMT3A_p.R882H; A3303
HYTDVSNMSH

SEQ ID NO: 23569 - protein, 10 aa, Homo sapiens
  AACR GENIE Results; DNMT3A_p.R882H; C0501
YTDVSNMSHL

SEQ ID NO: 23570 - protein, 9 aa, Homo sapiens
  AACR GENIE Results; DNMT3A_p.R882H; B3801
TDVSNMSHL

SEQ ID NO: 23571 - protein, 9 aa, Homo sapiens
  AACR GENIE Results; DNMT3A_p.R882H; A3303
VSNMSHLAR

SEQ ID NO: 23572 - protein, 11 aa, Homo sapiens
  AACR GENIE Results; DNMT3A_p.R882H; A2402
HYTDVSNMSHL

SEQ ID NO: 23573 - protein, 9 aa, Homo sapiens
  AACR GENIE Results; DNMT3A_p.R882H; A3303
NMSHLARQR

SEQ ID NO: 23574 - protein, 8 aa, Homo sapiens
  AACR GENIE Results; DNMT3A_p.R882H; A3101
SNMSHLAR

SEQ ID NO: 23575 - protein, 10 aa, Homo sapiens
  AACR GENIE Results; DNMT3A_p.R882H; A3303
SNMSHLARQR

SEQ ID NO: 23576 - protein, 10 aa, Homo sapiens
  AACR GENIE Results; DNMT3A_p.R882P; A6801
DVSNMSPLAR

SEQ ID NO: 23577 - protein, 9 aa, Homo sapiens
  AACR GENIE Results; DNMT3A_p.R882P; A3101
VSNMSPLAR

SEQ ID NO: 23578 - protein, 11 aa, Homo sapiens
  AACR GENIE Results; DNMT3A_p.R882P; A3101
VSNMSPLARQR

SEQ ID NO: 23579 - protein, 11 aa, Homo sapiens
  AACR GENIE Results; DNMT3A_p.R882P; A6801
TDVSNMSPLAR

SEQ ID NO: 23580 - protein, 9 aa, Homo sapiens
  AACR GENIE Results; DNMT3A_p.R882P; B0702
SPLARQRLL

SEQ ID NO: 23581 - protein, 9 aa, Homo sapiens
  AACR GENIE Results; DNMT3A_p.R882P; A6801
NMSPLARQR

SEQ ID NO: 23582 - protein, 8 aa, Homo sapiens
  AACR GENIE Results; DNMT3A_p.R882P; B0702
SPLARQRL

SEQ ID NO: 23583 - protein, 9 aa, Homo sapiens
  AACR GENIE Results; DNMT3A_p.R882P; A1101
VSNMSPLAR

SEQ ID NO: 23584 - protein, 9 aa, Homo sapiens
  AACR GENIE Results; DNMT3A_p.R882P; A6801
VSNMSPLAR

SEQ ID NO: 23585 - protein, 8 aa, Homo sapiens
  AACR GENIE Results; DNMT3A_p.R882P; A1101
SNMSPLAR

SEQ ID NO: 23586 - protein, 8 aa, Homo sapiens
  AACR GENIE Results; DNMT3A_p.R882P; A3101
SNMSPLAR

SEQ ID NO: 23587 - protein, 10 aa, Homo sapiens
  AACR GENIE Results; DNMT3A_p.R882P; C0802
YTDVSNMSPL

SEQ ID NO: 23588 - protein, 9 aa, Homo sapiens
  AACR GENIE Results; DNMT3A_p.R882P; A0301
VSNMSPLAR

SEQ ID NO: 23589 - protein, 9 aa, Homo sapiens
  AACR GENIE Results; DNMT3A_p.R882P; C0102
MSPLARQRL

SEQ ID NO: 23590 - protein, 8 aa, Homo sapiens
  AACR GENIE Results; DNMT3A_p.R882P; A6801
SNMSPLAR

SEQ ID NO: 23591 - protein, 9 aa, Homo sapiens
  AACR GENIE Results; DNMT3A_p.R882P; A6801
DVSNMSPLA

SEQ ID NO: 23592 - protein, 9 aa, Homo sapiens
  AACR GENIE Results; DNMT3A_p.R882P; A3101
NMSPLARQR

SEQ ID NO: 23593 - protein, 10 aa, Homo sapiens
  AACR GENIE Results; DNMT3A_p.R882P; A2601
DVSNMSPLAR

SEQ ID NO: 23594 - protein, 9 aa, Homo sapiens
  AACR GENIE Results; DNMT3A_p.S129L; C0102
TLPEALRAV

SEQ ID NO: 23595 - protein, 9 aa, Homo sapiens
  AACR GENIE Results; DNMT3A_p.S129L; B3502
AAETLPEAL

SEQ ID NO: 23596 - protein, 9 aa, Homo sapiens
  AACR GENIE Results; DNMT3A_p.S129L; C0801
AAETLPEAL

SEQ ID NO: 23597 - protein, 10 aa, Homo sapiens
  AACR GENIE Results; DNMT3A_p.S129L; A6802
ETLPEALRAV

SEQ ID NO: 23598 - protein, 8 aa, Homo sapiens
  AACR GENIE Results; DNMT3A_p.S129L; B4001
AETLPEAL

SEQ ID NO: 23599 - protein, 9 aa, Homo sapiens
  AACR GENIE Results; DNMT3A_p.S129L; C0802
AAETLPEAL

SEQ ID NO: 23600 - protein, 9 aa, Homo sapiens
  AACR GENIE Results; DNMT3A_p.S129L; A0206
TLPEALRAV

SEQ ID NO: 23601 - protein, 9 aa, Homo sapiens
  AACR GENIE Results; DNMT3A_p.S129L; A0201
TLPEALRAV

SEQ ID NO: 23602 - protein, 11 aa, Homo sapiens
  AACR GENIE Results; DNMT3A_p.S129L; A6801
GAAETLPEALR

SEQ ID NO: 23603 - protein, 8 aa, Homo sapiens
  AACR GENIE Results; DNMT3A_p.S129L; B4002
AETLPEAL

SEQ ID NO: 23604 - protein, 9 aa, Homo sapiens
  AACR GENIE Results; DNMT3A_p.S129L; B1502
AAETLPEAL

SEQ ID NO: 23605 - protein, 8 aa, Homo sapiens
  AACR GENIE Results; DNMT3A_p.S129L; B5101
LPEALRAV

SEQ ID NO: 23606 - protein, 9 aa, Homo sapiens
  AACR GENIE Results; DNMT3A_p.S129L; B3503
AAETLPEAL

SEQ ID NO: 23607 - protein, 9 aa, Homo sapiens
  AACR GENIE Results; DNMT3A_p.S129L; B5001
TLPEALRAV

SEQ ID NO: 23608 - protein, 9 aa, Homo sapiens
  AACR GENIE Results; DNMT3A_p.S129L; B3901
AAETLPEAL

SEQ ID NO: 23609 - protein, 9 aa, Homo sapiens
  AACR GENIE Results; DNMT3A_p.S129L; A0205
TLPEALRAV

SEQ ID NO: 23610 - protein, 9 aa, Homo sapiens
  AACR GENIE Results; DNMT3A_p.S129L; C0501
AAETLPEAL

SEQ ID NO: 23611 - protein, 11 aa, Homo sapiens
  AACR GENIE Results; DNMT3A_p.S129L; B4002
AETLPEALRAV

SEQ ID NO: 23612 - protein, 11 aa, Homo sapiens
  AACR GENIE Results; DNMT3A_p.S129L; B2702
GAAETLPEALR

SEQ ID NO: 23613 - protein, 10 aa, Homo sapiens
  AACR GENIE Results; DNMT3A_p.S129L; A6801
AAETLPEALR

SEQ ID NO: 23614 - protein, 9 aa, Homo sapiens
  AACR GENIE Results; DNMT3A_p.S129L; A6802
ETLPEALRA

SEQ ID NO: 23615 - protein, 8 aa, Homo sapiens
  AACR GENIE Results; DNMT3A_p.S129L; B3701
AETLPEAL

SEQ ID NO: 23616 - protein, 8 aa, Homo sapiens
  AACR GENIE Results; DNMT3A_p.S129L; A3303
ETLPEALR

SEQ ID NO: 23617 - protein, 8 aa, Homo sapiens
  AACR GENIE Results; DNMT3A_p.S129L; A3001
AETLPEAL

SEQ ID NO: 23618 - protein, 10 aa, Homo sapiens
  AACR GENIE Results; DNMT3A_p.S129L; A0205
AETLPEALRA

SEQ ID NO: 23619 - protein, 10 aa, Homo sapiens
  AACR GENIE Results; DNMT3A_p.S129L; A2601
ETLPEALRAV

SEQ ID NO: 23620 - protein, 10 aa, Homo sapiens
  AACR GENIE Results; DNMT3A_p.S129L; B5001
AETLPEALRA

SEQ ID NO: 23621 - protein, 8 aa, Homo sapiens
  AACR GENIE Results; DNMT3A_p.S129L; B5501
LPEALRAV

SEQ ID NO: 23622 - protein, 9 aa, Homo sapiens
  AACR GENIE Results; DNMT3A_p.S129L; B3501
AAETLPEAL

SEQ ID NO: 23623 - protein, 11 aa, Homo sapiens
  AACR GENIE Results; DNMT3A_p.S129L; A6802
GAAETLPEALR

SEQ ID NO: 23624 - protein, 9 aa, Homo sapiens
  AACR GENIE Results; DNMT3A_p.S129L; B1302
TLPEALRAV

SEQ ID NO: 23625 - protein, 10 aa, Homo sapiens
  AACR GENIE Results; DNMT3A_p.S129L; B4002
AETLPEALRA

SEQ ID NO: 23626 - protein, 10 aa, Homo sapiens
  AACR GENIE Results; DNMT3A_p.S129L; B4002
GAAETLPEAL

SEQ ID NO: 23627 - protein, 10 aa, Homo sapiens
  AACR GENIE Results; DNMT3A_p.S129L; B4403
AETLPEALRA

SEQ ID NO: 23628 - protein, 10 aa, Homo sapiens
  AACR GENIE Results; DNMT3A_p.S129L; A0205
ETLPEALRAV

SEQ ID NO: 23629 - protein, 10 aa, Homo sapiens
  AACR GENIE Results; DNMT3A_p.W440L; B1501
MLVEPEAAAY

SEQ ID NO: 23630 - protein, 10 aa, Homo sapiens
  AACR GENIE Results; DNMT3A_p.W440L; B3501
MLVEPEAAAY

SEQ ID NO: 23631 - protein, 9 aa, Homo sapiens
  AACR GENIE Results; DNMT3A_p.W440L; A0101
LVEPEAAAY

SEQ ID NO: 23632 - protein, 9 aa, Homo sapiens
  AACR GENIE Results; DNMT3A_p.W440L; B3501
LVEPEAAAY

SEQ ID NO: 23633 - protein, 9 aa, Homo sapiens
  AACR GENIE Results; DNMT3A_p.W440L; B1501
LVEPEAAAY

SEQ ID NO: 23634 - protein, 10 aa, Homo sapiens
  AACR GENIE Results; DNMT3A_p.W440L; A2601
MLVEPEAAAY

SEQ ID NO: 23635 - protein, 9 aa, Homo sapiens
  AACR GENIE Results; DNMT3A_p.W440L; A0201
MLVEPEAAA

SEQ ID NO: 23636 - protein, 10 aa, Homo sapiens
  AACR GENIE Results; DNMT3A_p.W440L; A0101
MLVEPEAAAY

SEQ ID NO: 23637 - protein, 9 aa, Homo sapiens
  AACR GENIE Results; DNMT3A_p.W440L; A2601
LVEPEAAAY

SEQ ID NO: 23638 - protein, 8 aa, Homo sapiens
  AACR GENIE Results; DNMT3A_p.W440L; B4001
KEVYTDML

SEQ ID NO: 23639 - protein, 9 aa, Homo sapiens
  AACR GENIE Results; EGFR_p.A289T; A0301
YSFGTTCVK

SEQ ID NO: 23640 - protein, 10 aa, Homo sapiens
  AACR GENIE Results; EGFR_p.A289T; A0301
YSFGTTCVKK

SEQ ID NO: 23641 - protein, 8 aa, Homo sapiens
  AACR GENIE Results; EGFR_p.A289V; B5101
YSFGVTCV

SEQ ID NO: 23642 - protein, 10 aa, Homo sapiens
  AACR GENIE Results; EGFR_p.A289V; A1101
YSFGVTCVKK

SEQ ID NO: 23643 - protein, 10 aa, Homo sapiens
  AACR GENIE Results; EGFR_p.A289V; A6801
YSFGVTCVKK

SEQ ID NO: 23644 - protein, 8 aa, Homo sapiens
  AACR GENIE Results; EGFR_p.A289V; B1302
YSFGVTCV

SEQ ID NO: 23645 - protein, 8 aa, Homo sapiens
  AACR GENIE Results; EGFR_p.A289V; C1203
YSFGVTCV

SEQ ID NO: 23646 - protein, 9 aa, Homo sapiens
  AACR GENIE Results; EGFR_p.A750P; A0301
ELREPTSPK

SEQ ID NO: 23647 - protein, 10 aa, Homo sapiens
  AACR GENIE Results; EGFR_p.A750P; A0301
KELREPTSPK

SEQ ID NO: 23648 - protein, 9 aa, Homo sapiens
  AACR GENIE Results; EGFR_p.A755G; B0702
SPKGNKEIL

SEQ ID NO: 23649 - protein, 9 aa, Homo sapiens
  AACR GENIE Results; EGFR_p.A755G; C0102
TSPKGNKEI

SEQ ID NO: 23650 - protein, 9 aa, Homo sapiens
  AACR GENIE Results; EGFR_p.A767_V769dup; A0201
YVMASVASV

SEQ ID NO: 23651 - protein, 10 aa, Homo sapiens
  AACR GENIE Results; EGFR_p.A767_V769dup; A6802
SVASVDNPHV

SEQ ID NO: 23652 - protein, 9 aa, Homo sapiens
  AACR GENIE Results; EGFR_p.A767_V769dup; A6802
YVMASVASV

SEQ ID NO: 23653 - protein, 10 aa, Homo sapiens
  AACR GENIE Results; EGFR_p.A767_V769dup; A0201
SVASVDNPHV

SEQ ID NO: 23654 - protein, 9 aa, Homo sapiens
  AACR GENIE Results; EGFR_p.A767_V769dup; B1302
YVMASVASV

SEQ ID NO: 23655 - protein, 9 aa, Homo sapiens
  AACR GENIE Results; EGFR_p.A767_V769dup; A2601
YVMASVASV

SEQ ID NO: 23656 - protein, 9 aa, Homo sapiens
  AACR GENIE Results; EGFR_p.A767_V769dup; B0801
YVMASVASV

SEQ ID NO: 23657 - protein, 10 aa, Homo sapiens
  AACR GENIE Results; EGFR_p.A767_V769dup; B1801
DEAYVMASVA

SEQ ID NO: 23658 - protein, 11 aa, Homo sapiens
  AACR GENIE Results; EGFR_p.A767_V769dup; A6802
SVASVDNPHVC

SEQ ID NO: 23659 - protein, 9 aa, Homo sapiens
  AACR GENIE Results; EGFR_p.A767_V769dup; A0201
VASVDNPHV

SEQ ID NO: 23660 - protein, 9 aa, Homo sapiens
  AACR GENIE Results; EGFR_p.A767_V769dup; A1101
SVASVDNPH

SEQ ID NO: 23661 - protein, 9 aa, Homo sapiens
  AACR GENIE Results; EGFR_p.A767_V769dup; B4002
YVMASVASV

SEQ ID NO: 23662 - protein, 9 aa, Homo sapiens
  AACR GENIE Results; EGFR_p.A767_V769dup; A3001
YVMASVASV

SEQ ID NO: 23663 - protein, 8 aa, Homo sapiens
  AACR GENIE Results; EGFR_p.A767_V769dup; A0201
VMASVASV

SEQ ID NO: 23664 - protein, 9 aa, Homo sapiens
  AACR GENIE Results; EGFR_p.A767_V769dup; B3503
YVMASVASV

SEQ ID NO: 23665 - protein, 9 aa, Homo sapiens
  AACR GENIE Results; EGFR_p.A767_V769dup; B5101
YVMASVASV

SEQ ID NO: 23666 - protein, 9 aa, Homo sapiens
  AACR GENIE Results; EGFR_p.C797S; B3501
MPFGSLLDY

SEQ ID NO: 23667 - protein, 10 aa, Homo sapiens
  AACR GENIE Results; EGFR_p.C797S; A6802
MPFGSLLDYV

SEQ ID NO: 23668 - protein, 10 aa, Homo sapiens
  AACR GENIE Results; EGFR_p.C797S; B5101
MPFGSLLDYV

SEQ ID NO: 23669 - protein, 9 aa, Homo sapiens
  AACR GENIE Results; EGFR_p.C797S; B3503
MPFGSLLDY

SEQ ID NO: 23670 - protein, 9 aa, Homo sapiens
  AACR GENIE Results; EGFR_p.C797S; B2702
MPFGSLLDY

SEQ ID NO: 23671 - protein, 10 aa, Homo sapiens
  AACR GENIE Results; EGFR_p.C797S; A2902
LMPFGSLLDY

SEQ ID NO: 23672 - protein, 9 aa, Homo sapiens
  AACR GENIE Results; EGFR_p.C797S; A0301
SLLDYVREH

SEQ ID NO: 23673 - protein, 11 aa, Homo sapiens
  AACR GENIE Results; EGFR_p.C797S; A2902
QLMPFGSLLDY

SEQ ID NO: 23674 - protein, 9 aa, Homo sapiens
  AACR GENIE Results; EGFR_p.E709_T710delinsD; A2301
DEFKKIKVL

SEQ ID NO: 23675 - protein, 9 aa, Homo sapiens
  AACR GENIE Results; EGFR_p.E709_T710delinsD; B1801
DEFKKIKVL

SEQ ID NO: 23676 - protein, 8 aa, Homo sapiens
  AACR GENIE Results; EGFR_p.E709_T710delinsD; B1801
DEFKKIKV

SEQ ID NO: 23677 - protein, 9 aa, Homo sapiens
  AACR GENIE Results; EGFR_p.E709_T710delinsD; B4403
DEFKKIKVL

SEQ ID NO: 23678 - protein, 9 aa, Homo sapiens
  AACR GENIE Results; EGFR_p.E709A; A0301
RILKATEFK

SEQ ID NO: 23679 - protein, 9 aa, Homo sapiens
  AACR GENIE Results; EGFR_p.E709V; B5101
QALLRILKV

SEQ ID NO: 23680 - protein, 9 aa, Homo sapiens
  AACR GENIE Results; EGFR_p.E709V; C0602
LRILKVTEF

SEQ ID NO: 23681 - protein, 9 aa, Homo sapiens
  AACR GENIE Results; EGFR_p.E746_A750del; B5502
IPVAIKTSP

SEQ ID NO: 23682 - protein, 9 aa, Homo sapiens
  AACR GENIE Results; EGFR_p.E746_A750del; B5401
IPVAIKTSP

SEQ ID NO: 23683 - protein, 9 aa, Homo sapiens
  AACR GENIE Results; EGFR_p.E746_A750del; B5501
IPVAIKTSP

SEQ ID NO: 23684 - protein, 11 aa, Homo sapiens
  AACR GENIE Results; EGFR_p.E746_A750del; B5401
IPVAIKTSPKA

SEQ ID NO: 23685 - protein, 11 aa, Homo sapiens
  AACR GENIE Results; EGFR_p.E746_A750del; B5502
IPVAIKTSPKA

SEQ ID NO: 23686 - protein, 9 aa, Homo sapiens
  AACR GENIE Results; EGFR_p.E746_A750del; A0301
PVAIKTSPK

SEQ ID NO: 23687 - protein, 9 aa, Homo sapiens
  AACR GENIE Results; EGFR_p.E746_A750del; B3501
IPVAIKTSP

SEQ ID NO: 23688 - protein, 8 aa, Homo sapiens
  AACR GENIE Results; EGFR_p.E746_A750del; A1101
VAIKTSPK

SEQ ID NO: 23689 - protein, 11 aa, Homo sapiens
  AACR GENIE Results; EGFR_p.E746_A750del; A0301
KIPVAIKTSPK

SEQ ID NO: 23690 - protein, 9 aa, Homo sapiens
  AACR GENIE Results; EGFR_p.E746_A750del; A1101
PVAIKTSPK

SEQ ID NO: 23691 - protein, 9 aa, Homo sapiens
  AACR GENIE Results; EGFR_p.E746_A750del; A0302
PVAIKTSPK

SEQ ID NO: 23692 - protein, 9 aa, Homo sapiens
  AACR GENIE Results; EGFR_p.E746_T751delinsA; A0301
PVAIKASPK

SEQ ID NO: 23693 - protein, 9 aa, Homo sapiens
  AACR GENIE Results; EGFR_p.E746_T751delinsA; C0102
ASPKANKEI

SEQ ID NO: 23694 - protein, 9 aa, Homo sapiens
  AACR GENIE Results; EGFR_p.G719A; B1501
ASGAFGTVY

SEQ ID NO: 23695 - protein, 10 aa, Homo sapiens
  AACR GENIE Results; EGFR_p.G719A; A1101
ASGAFGTVYK

SEQ ID NO: 23696 - protein, 9 aa, Homo sapiens
  AACR GENIE Results; EGFR_p.G719A; B1503
IKVLASGAF

SEQ ID NO: 23697 - protein, 9 aa, Homo sapiens
  AACR GENIE Results; EGFR_p.G719A; A3002
ASGAFGTVY

SEQ ID NO: 23698 - protein, 11 aa, Homo sapiens
  AACR GENIE Results; EGFR_p.G719A; B1501
VLASGAFGTVY

SEQ ID NO: 23699 - protein, 9 aa, Homo sapiens
  AACR GENIE Results; EGFR_p.G719A; B1503
ASGAFGTVY

SEQ ID NO: 23700 - protein, 9 aa, Homo sapiens
  AACR GENIE Results; EGFR_p.G719A; B5801
ASGAFGTVY

SEQ ID NO: 23701 - protein, 10 aa, Homo sapiens
  AACR GENIE Results; EGFR_p.G719A; A0301
ASGAFGTVYK

SEQ ID NO: 23702 - protein, 10 aa, Homo sapiens
  AACR GENIE Results; EGFR_p.G719A; B1501
LASGAFGTVY

SEQ ID NO: 23703 - protein, 9 aa, Homo sapiens
  AACR GENIE Results; EGFR_p.G719A; B3901
ASGAFGTVY

SEQ ID NO: 23704 - protein, 10 aa, Homo sapiens
  AACR GENIE Results; EGFR_p.G719A; C0202
LASGAFGTVY

SEQ ID NO: 23705 - protein, 10 aa, Homo sapiens
  AACR GENIE Results; EGFR_p.G719A; B3501
LASGAFGTVY

SEQ ID NO: 23706 - protein, 10 aa, Homo sapiens
  AACR GENIE Results; EGFR_p.G719A; A0201
VLASGAFGTV

SEQ ID NO: 23707 - protein, 9 aa, Homo sapiens
  AACR GENIE Results; EGFR_p.G719A; B5101
LASGAFGTV

SEQ ID NO: 23708 - protein, 10 aa, Homo sapiens
  AACR GENIE Results; EGFR_p.G719A; A3002
LASGAFGTVY

SEQ ID NO: 23709 - protein, 9 aa, Homo sapiens
  AACR GENIE Results; EGFR_p.G719C; B1501
CSGAFGTVY

SEQ ID NO: 23710 - protein, 9 aa, Homo sapiens
  AACR GENIE Results; EGFR_p.G719C; B5801
CSGAFGTVY

SEQ ID NO: 23711 - protein, 10 aa, Homo sapiens
  AACR GENIE Results; EGFR_p.G719C; A1101
CSGAFGTVYK

SEQ ID NO: 23712 - protein, 9 aa, Homo sapiens
  AACR GENIE Results; EGFR_p.G719S; B1501
SSGAFGTVY

SEQ ID NO: 23713 - protein, 10 aa, Homo sapiens
  AACR GENIE Results; EGFR_p.G719S; A1101
SSGAFGTVYK

SEQ ID NO: 23714 - protein, 11 aa, Homo sapiens
  AACR GENIE Results; EGFR_p.G719S; B1501
VLSSGAFGTVY

SEQ ID NO: 23715 - protein, 11 aa, Homo sapiens
  AACR GENIE Results; EGFR_p.G719S; A1101
LSSGAFGTVYK

SEQ ID NO: 23716 - protein, 9 aa, Homo sapiens
  AACR GENIE Results; EGFR_p.G719S; B3901
SSGAFGTVY

SEQ ID NO: 23717 - protein, 10 aa, Homo sapiens
  AACR GENIE Results; EGFR_p.G719S; B1501
LSSGAFGTVY

SEQ ID NO: 23718 - protein, 9 aa, Homo sapiens
  AACR GENIE Results; EGFR_p.G719S; B3501
SSGAFGTVY

SEQ ID NO: 23719 - protein, 10 aa, Homo sapiens
  AACR GENIE Results; EGFR_p.G719S; A6801
SSGAFGTVYK

SEQ ID NO: 23720 - protein, 10 aa, Homo sapiens
  AACR GENIE Results; EGFR_p.G719S; B2702
SSGAFGTVYK

SEQ ID NO: 23721 - protein, 9 aa, Homo sapiens
  AACR GENIE Results; EGFR_p.G724S; A1101
SGAFSTVYK

SEQ ID NO: 23722 - protein, 9 aa, Homo sapiens
  AACR GENIE Results; EGFR_p.G724S; B1501
GSGAFSTVY

SEQ ID NO: 23723 - protein, 10 aa, Homo sapiens
  AACR GENIE Results; EGFR_p.G724S; A1101
GSGAFSTVYK

SEQ ID NO: 23724 - protein, 9 aa, Homo sapiens
  AACR GENIE Results; EGFR_p.G724S; A0301
SGAFSTVYK

SEQ ID NO: 23725 - protein, 8 aa, Homo sapiens
  AACR GENIE Results; EGFR_p.G724S; B1501
SGAFSTVY

SEQ ID NO: 23726 - protein, 11 aa, Homo sapiens
  AACR GENIE Results; EGFR_p.G724S; B1501
VLGSGAFSTVY

SEQ ID NO: 23727 - protein, 9 aa, Homo sapiens
  AACR GENIE Results; EGFR_p.G724S; A6801
SGAFSTVYK

SEQ ID NO: 23728 - protein, 10 aa, Homo sapiens
  AACR GENIE Results; EGFR_p.G724S; A0301
GSGAFSTVYK

SEQ ID NO: 23729 - protein, 11 aa, Homo sapiens
  AACR GENIE Results; EGFR_p.G724S; A0201
KVLGSGAFSTV

SEQ ID NO: 23730 - protein, 8 aa, Homo sapiens
  AACR GENIE Results; EGFR_p.G724S; A1101
GAFSTVYK

SEQ ID NO: 23731 - protein, 8 aa, Homo sapiens
  AACR GENIE Results; EGFR_p.G724S; B3501
SGAFSTVY

SEQ ID NO: 23732 - protein, 9 aa, Homo sapiens
  AACR GENIE Results; EGFR_p.H773_V774insAH; C0501
SVDNPHAHV

SEQ ID NO: 23733 - protein, 9 aa, Homo sapiens
  AACR GENIE Results; EGFR_p.H773_V774insAH; A1101
ASVDNPHAH

SEQ ID NO: 23734 - protein, 11 aa, Homo sapiens
  AACR GENIE Results; EGFR_p.H773_V774insAH; A1101
SVDNPHAHVCR

SEQ ID NO: 23735 - protein, 8 aa, Homo sapiens
  AACR GENIE Results; EGFR_p.H773dup; C0501
SVDNPHHV

SEQ ID NO: 23736 - protein, 10 aa, Homo sapiens
  AACR GENIE Results; EGFR_p.H773dup; A1101
SVDNPHHVCR

SEQ ID NO: 23737 - protein, 10 aa, Homo sapiens
  AACR GENIE Results; EGFR_p.H773dup; A6801
SVDNPHHVCR

SEQ ID NO: 23738 - protein, 11 aa, Homo sapiens
  AACR GENIE Results; EGFR_p.H773dup; A0201
VMASVDNPHHV

SEQ ID NO: 23739 - protein, 8 aa, Homo sapiens
  AACR GENIE Results; EGFR_p.H773dup; C0802
SVDNPHHV

SEQ ID NO: 23740 - protein, 8 aa, Homo sapiens
  AACR GENIE Results; EGFR_p.H773dup; C0401
SVDNPHHV

SEQ ID NO: 23741 - protein, 9 aa, Homo sapiens
  AACR GENIE Results; EGFR_p.H773dup; C0802
SVDNPHHVC

SEQ ID NO: 23742 - protein, 9 aa, Homo sapiens
  AACR GENIE Results; EGFR_p.I740_K745dup; A0301
AIKIPVAIK

SEQ ID NO: 23743 - protein, 11 aa, Homo sapiens
  AACR GENIE Results; EGFR_p.L62R; A2601
EVVRGNLEITY

SEQ ID NO: 23744 - protein, 10 aa, Homo sapiens
  AACR GENIE Results; EGFR_p.L62R; B1501
VVRGNLEITY

SEQ ID NO: 23745 - protein, 11 aa, Homo sapiens
  AACR GENIE Results; EGFR_p.L62R; B3501
EVVRGNLEITY

SEQ ID NO: 23746 - protein, 9 aa, Homo sapiens
  AACR GENIE Results; EGFR_p.L747_E749del; A0301
AIKEATSPK

SEQ ID NO: 23747 - protein, 8 aa, Homo sapiens
  AACR GENIE Results; EGFR_p.L747_E749del; B5501
IPVAIKEA

SEQ ID NO: 23748 - protein, 9 aa, Homo sapiens
  AACR GENIE Results; EGFR_p.L747_E749del; A3001
AIKEATSPK

SEQ ID NO: 23749 - protein, 9 aa, Homo sapiens
  AACR GENIE Results; EGFR_p.L747_E749del; A1101
AIKEATSPK

SEQ ID NO: 23750 - protein, 10 aa, Homo sapiens
  AACR GENIE Results; EGFR_p.L747_E749del; B2702
VAIKEATSPK

SEQ ID NO: 23751 - protein, 10 aa, Homo sapiens
  AACR GENIE Results; EGFR_p.L747_E749del; A1101
VAIKEATSPK

SEQ ID NO: 23752 - protein, 10 aa, Homo sapiens
  AACR GENIE Results; EGFR_p.L747_E749del; A0301
VAIKEATSPK

SEQ ID NO: 23753 - protein, 9 aa, Homo sapiens
  AACR GENIE Results; EGFR_p.L858R; C0501
ITDFGRAKL

SEQ ID NO: 23754 - protein, 9 aa, Homo sapiens
  AACR GENIE Results; EGFR_p.L858R; B3701
TDFGRAKLL

SEQ ID NO: 23755 - protein, 9 aa, Homo sapiens
  AACR GENIE Results; EGFR_p.L858R; C0802
ITDFGRAKL

SEQ ID NO: 23756 - protein, 8 aa, Homo sapiens
  AACR GENIE Results; EGFR_p.L858R; B4102
TDFGRAKL

SEQ ID NO: 23757 - protein, 8 aa, Homo sapiens
  AACR GENIE Results; EGFR_p.L858R; B4002
TDFGRAKL

SEQ ID NO: 23758 - protein, 9 aa, Homo sapiens
  AACR GENIE Results; EGFR_p.L858R; A0301
KITDFGRAK

SEQ ID NO: 23759 - protein, 9 aa, Homo sapiens
  AACR GENIE Results; EGFR_p.L858R; A1101
KITDFGRAK

SEQ ID NO: 23760 - protein, 11 aa, Homo sapiens
  AACR GENIE Results; EGFR_p.L858R; B2705
GRAKLLGAEEK

SEQ ID NO: 23761 - protein, 10 aa, Homo sapiens
  AACR GENIE Results; EGFR_p.L861Q; B1501
KQLGAEEKEY

SEQ ID NO: 23762 - protein, 10 aa, Homo sapiens
  AACR GENIE Results; EGFR_p.L861Q; A3002
KQLGAEEKEY

SEQ ID NO: 23763 - protein, 9 aa, Homo sapiens
  AACR GENIE Results; EGFR_p.L861Q; B4403
TDFGLAKQL

SEQ ID NO: 23764 - protein, 9 aa, Homo sapiens
  AACR GENIE Results; EGFR_p.L861Q; B4002
TDFGLAKQL

SEQ ID NO: 23765 - protein, 10 aa, Homo sapiens
  AACR GENIE Results; EGFR_p.L861Q; B1503
KQLGAEEKEY

SEQ ID NO: 23766 - protein, 9 aa, Homo sapiens
  AACR GENIE Results; EGFR_p.L861Q; B4402
TDFGLAKQL

SEQ ID NO: 23767 - protein, 9 aa, Homo sapiens
  AACR GENIE Results; EGFR_p.L861R; B4403
TDFGLAKRL

SEQ ID NO: 23768 - protein, 10 aa, Homo sapiens
  AACR GENIE Results; EGFR_p.N771_H773dup; A0201
SVDNPHNPHV

SEQ ID NO: 23769 - protein, 10 aa, Homo sapiens
  AACR GENIE Results; EGFR_p.N771_P772insH; A1101
SVDNHPHVCR

SEQ ID NO: 23770 - protein, 10 aa, Homo sapiens
  AACR GENIE Results; EGFR_p.N771_P772insH; A3101
SVDNHPHVCR

SEQ ID NO: 23771 - protein, 8 aa, Homo sapiens
  AACR GENIE Results; EGFR_p.N771_P772insH; C0501
SVDNHPHV

SEQ ID NO: 23772 - protein, 8 aa, Homo sapiens
  AACR GENIE Results; EGFR_p.N771_P772insH; C0802
SVDNHPHV

SEQ ID NO: 23773 - protein, 10 aa, Homo sapiens
  AACR GENIE Results; EGFR_p.N771_P772insH; A6801
SVDNHPHVCR

SEQ ID NO: 23774 - protein, 9 aa, Homo sapiens
  AACR GENIE Results; EGFR_p.N771_P772insH; C1502
ASVDNHPHV

SEQ ID NO: 23775 - protein, 9 aa, Homo sapiens
  AACR GENIE Results; EGFR_p.N771_P772insH; A3101
VDNHPHVCR

SEQ ID NO: 23776 - protein, 9 aa, Homo sapiens
  AACR GENIE Results; EGFR_p.N771_P772insH; B1302
ASVDNHPHV

SEQ ID NO: 23777 - protein, 10 aa, Homo sapiens
  AACR GENIE Results; EGFR_p.N771dup; A1101
SVDNNPHVCR

SEQ ID NO: 23778 - protein, 8 aa, Homo sapiens
  AACR GENIE Results; EGFR_p.N771dup; C0501
SVDNNPHV

SEQ ID NO: 23779 - protein, 9 aa, Homo sapiens
  AACR GENIE Results; EGFR_p.N771dup; A0201
SVDNNPHVC

SEQ ID NO: 23780 - protein, 9 aa, Homo sapiens
  AACR GENIE Results; EGFR_p.R108K; B1501
LQIIKGNMY

SEQ ID NO: 23781 - protein, 9 aa, Homo sapiens
  AACR GENIE Results; EGFR_p.R108K; B1501
QIIKGNMYY

SEQ ID NO: 23782 - protein, 8 aa, Homo sapiens
  AACR GENIE Results; EGFR_p.R108K; B1501
QIIKGNMY

SEQ ID NO: 23783 - protein, 9 aa, Homo sapiens
  AACR GENIE Results; EGFR_p.R108K; A2902
QIIKGNMYY

SEQ ID NO: 23784 - protein, 10 aa, Homo sapiens
  AACR GENIE Results; EGFR_p.R748K; A0301
KELKEATSPK

SEQ ID NO: 23785 - protein, 9 aa, Homo sapiens
  AACR GENIE Results; EGFR_p.R748K; A0301
ELKEATSPK

SEQ ID NO: 23786 - protein, 10 aa, Homo sapiens
  AACR GENIE Results; EGFR_p.R776H; C0501
SVDNPHVCHL

SEQ ID NO: 23787 - protein, 10 aa, Homo sapiens
  AACR GENIE Results; EGFR_p.R776H; A1101
SVDNPHVCHL

SEQ ID NO: 23788 - protein, 9 aa, Homo sapiens
  AACR GENIE Results; EGFR_p.S177L; A0201
MLMDFQNHL

SEQ ID NO: 23789 - protein, 9 aa, Homo sapiens
  AACR GENIE Results; EGFR_p.S177L; C0802
SSDFLSNML

SEQ ID NO: 23790 - protein, 8 aa, Homo sapiens
  AACR GENIE Results; EGFR_p.S177L; C0802
LMDFQNHL

SEQ ID NO: 23791 - protein, 9 aa, Homo sapiens
  AACR GENIE Results; EGFR_p.S752_I759del; A0201
TLDEAYVMA

SEQ ID NO: 23792 - protein, 11 aa, Homo sapiens
  AACR GENIE Results; EGFR_p.S752_I759del; B4001
REATLDEAYVM

SEQ ID NO: 23793 - protein, 8 aa, Homo sapiens
  AACR GENIE Results; EGFR_p.S752_I759del; B3501
TLDEAYVM

SEQ ID NO: 23794 - protein, 9 aa, Homo sapiens
  AACR GENIE Results; EGFR_p.S752_I759del; B1801
REATLDEAY

SEQ ID NO: 23795 - protein, 9 aa, Homo sapiens
  AACR GENIE Results; EGFR_p.S752_I759del; B4403
REATLDEAY

SEQ ID NO: 23796 - protein, 8 aa, Homo sapiens
  AACR GENIE Results; EGFR_p.S752_I759del; C0802
TLDEAYVM

SEQ ID NO: 23797 - protein, 9 aa, Homo sapiens
  AACR GENIE Results; EGFR_p.S752_I759del; A0201
ATLDEAYVM

SEQ ID NO: 23798 - protein, 8 aa, Homo sapiens
  AACR GENIE Results; EGFR_p.S752_I759del; C0501
TLDEAYVM

SEQ ID NO: 23799 - protein, 9 aa, Homo sapiens
  AACR GENIE Results; EGFR_p.S752_I759del; A1101
ATLDEAYVM

SEQ ID NO: 23800 - protein, 11 aa, Homo sapiens
  AACR GENIE Results; EGFR_p.S752_I759del; A2601
ELREATLDEAY

SEQ ID NO: 23801 - protein, 8 aa, Homo sapiens
  AACR GENIE Results; EGFR_p.S752_I759del; B3501
EATLDEAY

SEQ ID NO: 23802 - protein, 9 aa, Homo sapiens
  AACR GENIE Results; EGFR_p.S752_I759del; B4402
REATLDEAY

SEQ ID NO: 23803 - protein, 9 aa, Homo sapiens
  AACR GENIE Results; EGFR_p.S752_I759del; B1501
REATLDEAY

SEQ ID NO: 23804 - protein, 9 aa, Homo sapiens
  AACR GENIE Results; EGFR_p.S752_I759del; B5701
ATLDEAYVM

SEQ ID NO: 23805 - protein, 10 aa, Homo sapiens
  AACR GENIE Results; EGFR_p.S768_D770dup; A6801
DSVDNPHVCR

SEQ ID NO: 23806 - protein, 9 aa, Homo sapiens
  AACR GENIE Results; EGFR_p.S768_D770dup; A0201
YVMASVDSV

SEQ ID NO: 23807 - protein, 10 aa, Homo sapiens
  AACR GENIE Results; EGFR_p.S768_D770dup; A0201
SVDSVDNPHV

SEQ ID NO: 23808 - protein, 9 aa, Homo sapiens
  AACR GENIE Results; EGFR_p.S768_D770dup; B1302
YVMASVDSV

SEQ ID NO: 23809 - protein, 9 aa, Homo sapiens
  AACR GENIE Results; EGFR_p.S768_D770dup; A2601
YVMASVDSV

SEQ ID NO: 23810 - protein, 8 aa, Homo sapiens
  AACR GENIE Results; EGFR_p.S768_D770dup; B5101
DSVDNPHV

SEQ ID NO: 23811 - protein, 8 aa, Homo sapiens
  AACR GENIE Results; EGFR_p.S768I; B1801
DEAYVMAI

SEQ ID NO: 23812 - protein, 8 aa, Homo sapiens
  AACR GENIE Results; EGFR_p.S768I; B5101
EAYVMAIV

SEQ ID NO: 23813 - protein, 9 aa, Homo sapiens
  AACR GENIE Results; EGFR_p.S768I; A3303
IVDNPHVCR

SEQ ID NO: 23814 - protein, 8 aa, Homo sapiens
  AACR GENIE Results; EGFR_p.S768I; B4901
DEAYVMAI

SEQ ID NO: 23815 - protein, 10 aa, Homo sapiens
  AACR GENIE Results; EGFR_p.S768I; C0501
IVDNPHVCRL

SEQ ID NO: 23816 - protein, 9 aa, Homo sapiens
  AACR GENIE Results; EGFR_p.S768I; A3101
IVDNPHVCR

SEQ ID NO: 23817 - protein, 9 aa, Homo sapiens
  AACR GENIE Results; EGFR_p.S768I; B3503
MAIVDNPHV

SEQ ID NO: 23818 - protein, 9 aa, Homo sapiens
  AACR GENIE Results; EGFR_p.S768I; B3502
MAIVDNPHV

SEQ ID NO: 23819 - protein, 10 aa, Homo sapiens
  AACR GENIE Results; EGFR_p.S768I; A0201
VMAIVDNPHV

SEQ ID NO: 23820 - protein, 9 aa, Homo sapiens
  AACR GENIE Results; EGFR_p.S768I; A1101
IVDNPHVCR

SEQ ID NO: 23821 - protein, 9 aa, Homo sapiens
  AACR GENIE Results; EGFR_p.S768I; A6802
MAIVDNPHV

SEQ ID NO: 23822 - protein, 9 aa, Homo sapiens
  AACR GENIE Results; EGFR_p.S768I; A6801
IVDNPHVCR

SEQ ID NO: 23823 - protein, 9 aa, Homo sapiens
  AACR GENIE Results; EGFR_p.S768I; A0201
AIVDNPHVC

SEQ ID NO: 23824 - protein, 9 aa, Homo sapiens
  AACR GENIE Results; EGFR_p.S768I; A0205
AIVDNPHVC

SEQ ID NO: 23825 - protein, 9 aa, Homo sapiens
  AACR GENIE Results; EGFR_p.S768I; B5101
MAIVDNPHV

SEQ ID NO: 23826 - protein, 10 aa, Homo sapiens
  AACR GENIE Results; EGFR_p.S768I; A6801
AIVDNPHVCR

SEQ ID NO: 23827 - protein, 9 aa, Homo sapiens
  AACR GENIE Results; EGFR_p.S768I; A3301
IVDNPHVCR

SEQ ID NO: 23828 - protein, 10 aa, Homo sapiens
  AACR GENIE Results; EGFR_p.S768I; C0802
IVDNPHVCRL

SEQ ID NO: 23829 - protein, 9 aa, Homo sapiens
  AACR GENIE Results; EGFR_p.S768I; B5001
AIVDNPHVC

SEQ ID NO: 23830 - protein, 9 aa, Homo sapiens
  AACR GENIE Results; EGFR_p.S768I; A0201
MAIVDNPHV

SEQ ID NO: 23831 - protein, 11 aa, Homo sapiens
  AACR GENIE Results; EGFR_p.S768I; A0201
YVMAIVDNPHV

SEQ ID NO: 23832 - protein, 9 aa, Homo sapiens
  AACR GENIE Results; EGFR_p.S768I; A0301
IVDNPHVCR

SEQ ID NO: 23833 - protein, 10 aa, Homo sapiens
  AACR GENIE Results; EGFR_p.S768I; C0802
ILDEAYVMAI

SEQ ID NO: 23834 - protein, 9 aa, Homo sapiens
  AACR GENIE Results; EGFR_p.T751I; A0301
ELREAISPK

SEQ ID NO: 23835 - protein, 9 aa, Homo sapiens
  AACR GENIE Results; EGFR_p.T751I; C0102
ISPKANKEI

SEQ ID NO: 23836 - protein, 9 aa, Homo sapiens
  AACR GENIE Results; EGFR_p.T790M; A0205
STVQLIMQL

SEQ ID NO: 23837 - protein, 9 aa, Homo sapiens
  AACR GENIE Results; EGFR_p.T790M; A6802
STVQLIMQL

SEQ ID NO: 23838 - protein, 9 aa, Homo sapiens
  AACR GENIE Results; EGFR_p.T790M; A0206
STVQLIMQL

SEQ ID NO: 23839 - protein, 9 aa, Homo sapiens
  AACR GENIE Results; EGFR_p.T790M; A1101
STVQLIMQL

SEQ ID NO: 23840 - protein, 9 aa, Homo sapiens
  AACR GENIE Results; EGFR_p.T790M; A2601
STVQLIMQL

SEQ ID NO: 23841 - protein, 9 aa, Homo sapiens
  AACR GENIE Results; EGFR_p.T790M; C1502
LTSTVQLIM

SEQ ID NO: 23842 - protein, 9 aa, Homo sapiens
  AACR GENIE Results; EGFR_p.T790M; B5801
STVQLIMQL

SEQ ID NO: 23843 - protein, 9 aa, Homo sapiens
  AACR GENIE Results; EGFR_p.T790M; A6801
STVQLIMQL

SEQ ID NO: 23844 - protein, 9 aa, Homo sapiens
  AACR GENIE Results; EGFR_p.T790M; C1502
STVQLIMQL

SEQ ID NO: 23845 - protein, 8 aa, Homo sapiens
  AACR GENIE Results; EGFR_p.V765L; B5101
EAYLMASV

SEQ ID NO: 23846 - protein, 9 aa, Homo sapiens
  AACR GENIE Results; EGFR_p.V765L; B1801
DEAYLMASV

SEQ ID NO: 23847 - protein, 9 aa, Homo sapiens
  AACR GENIE Results; EGFR_p.V765L; B4001
KEILDEAYL

SEQ ID NO: 23848 - protein, 9 aa, Homo sapiens
  AACR GENIE Results; EGFR_p.V765L; A0201
ILDEAYLMA

SEQ ID NO: 23849 - protein, 11 aa, Homo sapiens
  AACR GENIE Results; EGFR_p.V765L; A0201
YLMASVDNPHV

SEQ ID NO: 23850 - protein, 8 aa, Homo sapiens
  AACR GENIE Results; EGFR_p.V765L; C0501
ILDEAYLM

SEQ ID NO: 23851 - protein, 10 aa, Homo sapiens
  AACR GENIE Results; EGFR_p.V765L; A0201
LMASVDNPHV

SEQ ID NO: 23852 - protein, 8 aa, Homo sapiens
  AACR GENIE Results; EGFR_p.V765L; C0802
ILDEAYLM

SEQ ID NO: 23853 - protein, 9 aa, Homo sapiens
  AACR GENIE Results; EGFR_p.V769L; B1801
DEAYVMASL

SEQ ID NO: 23854 - protein, 8 aa, Homo sapiens
  AACR GENIE Results; EGFR_p.V769L; B5101
EAYVMASL

SEQ ID NO: 23855 - protein, 10 aa, Homo sapiens
  AACR GENIE Results; EGFR_p.V769L; A0201
VMASLDNPHV

SEQ ID NO: 23856 - protein, 9 aa, Homo sapiens
  AACR GENIE Results; EGFR_p.V769L; A1101
SLDNPHVCR

SEQ ID NO: 23857 - protein, 11 aa, Homo sapiens
  AACR GENIE Results; EGFR_p.V769L; A1101
ASLDNPHVCRL

SEQ ID NO: 23858 - protein, 10 aa, Homo sapiens
  AACR GENIE Results; EGFR_p.V769L; A0301
SLDNPHVCRL

SEQ ID NO: 23859 - protein, 8 aa, Homo sapiens
  AACR GENIE Results; EGFR_p.V769L; B0801
EAYVMASL

SEQ ID NO: 23860 - protein, 9 aa, Homo sapiens
  AACR GENIE Results; EGFR_p.V769M; B1801
DEAYVMASM

SEQ ID NO: 23861 - protein, 9 aa, Homo sapiens
  AACR GENIE Results; EGFR_p.V769M; B3701
MDNPHVCRL

SEQ ID NO: 23862 - protein, 8 aa, Homo sapiens
  AACR GENIE Results; EGFR_p.V769M; B5101
EAYVMASM

SEQ ID NO: 23863 - protein, 10 aa, Homo sapiens
  AACR GENIE Results; EGFR_p.V769M; A3101
ASMDNPHVCR

SEQ ID NO: 23864 - protein, 8 aa, Homo sapiens
  AACR GENIE Results; EGFR_p.V769M; A3303
MDNPHVCR

SEQ ID NO: 23865 - protein, 9 aa, Homo sapiens
  AACR GENIE Results; EGFR_p.V769M; A3303
SMDNPHVCR

SEQ ID NO: 23866 - protein, 10 aa, Homo sapiens
  AACR GENIE Results; EGFR_p.V769M; A1101
ASMDNPHVCR

SEQ ID NO: 23867 - protein, 9 aa, Homo sapiens
  AACR GENIE Results; EGFR_p.V769M; A3001
ASMDNPHVC

SEQ ID NO: 23868 - protein, 10 aa, Homo sapiens
  AACR GENIE Results; EGFR_p.V769M; A3303
ASMDNPHVCR

SEQ ID NO: 23869 - protein, 9 aa, Homo sapiens
  AACR GENIE Results; EGFR_p.V769M; A3101
SMDNPHVCR

SEQ ID NO: 23870 - protein, 10 aa, Homo sapiens
  AACR GENIE Results; EGFR_p.V769M; A0201
VMASMDNPHV

SEQ ID NO: 23871 - protein, 10 aa, Homo sapiens
  AACR GENIE Results; EGFR_p.V769M; A6801
ASMDNPHVCR

SEQ ID NO: 23872 - protein, 9 aa, Homo sapiens
  AACR GENIE Results; EGFR_p.V769M; B4002
MDNPHVCRL

SEQ ID NO: 23873 - protein, 8 aa, Homo sapiens
  AACR GENIE Results; EGFR_p.V769M; A3301
MDNPHVCR

SEQ ID NO: 23874 - protein, 8 aa, Homo sapiens
  AACR GENIE Results; EGFR_p.V769M; B3501
EAYVMASM

SEQ ID NO: 23875 - protein, 11 aa, Homo sapiens
  AACR GENIE Results; EGFR_p.V769M; A1101
ASMDNPHVCRL

SEQ ID NO: 23876 - protein, 9 aa, Homo sapiens
  AACR GENIE Results; EGFR_p.V769M; A1101
SMDNPHVCR

SEQ ID NO: 23877 - protein, 8 aa, Homo sapiens
  AACR GENIE Results; EGFR_p.V769M; A3101
MDNPHVCR

SEQ ID NO: 23878 - protein, 10 aa, Homo sapiens
  AACR GENIE Results; EGFR_p.V769M; A0301
SMDNPHVCRL

SEQ ID NO: 23879 - protein, 10 aa, Homo sapiens
  AACR GENIE Results; EGFR_p.V769M; A3001
ASMDNPHVCR

SEQ ID NO: 23880 - protein, 8 aa, Homo sapiens
  AACR GENIE Results; EGFR_p.V769M; B0801
EAYVMASM

SEQ ID NO: 23881 - protein, 8 aa, Homo sapiens
  AACR GENIE Results; EGFR_p.V769M; A6801
MDNPHVCR

SEQ ID NO: 23882 - protein, 10 aa, Homo sapiens
  AACR GENIE Results; EGFR_p.V769M; A3301
ASMDNPHVCR

SEQ ID NO: 23883 - protein, 9 aa, Homo sapiens
  AACR GENIE Results; EGFR_p.V769M; A1101
ASMDNPHVC

SEQ ID NO: 23884 - protein, 9 aa, Homo sapiens
  AACR GENIE Results; EGFR_p.V769M; A6801
SMDNPHVCR

SEQ ID NO: 23885 - protein, 9 aa, Homo sapiens
  AACR GENIE Results; EGFR_p.V769M; B4002
DEAYVMASM

SEQ ID NO: 23886 - protein, 9 aa, Homo sapiens
  AACR GENIE Results; EGFR_p.V774M; B3501
MASVDNPHM

SEQ ID NO: 23887 - protein, 9 aa, Homo sapiens
  AACR GENIE Results; EGFR_p.V774M; A1101
SVDNPHMCR

SEQ ID NO: 23888 - protein, 10 aa, Homo sapiens
  AACR GENIE Results; EGFR_p.V774M; A0201
VMASVDNPHM

SEQ ID NO: 23889 - protein, 9 aa, Homo sapiens
  AACR GENIE Results; EGFR_p.V774M; C1601
MASVDNPHM

SEQ ID NO: 23890 - protein, 10 aa, Homo sapiens
  AACR GENIE Results; EGFR_p.V774M; C0501
SVDNPHMCRL

SEQ ID NO: 23891 - protein, 9 aa, Homo sapiens
  AACR GENIE Results; EGFR_p.V774M; C0304
MASVDNPHM

SEQ ID NO: 23892 - protein, 8 aa, Homo sapiens
  AACR GENIE Results; EGFR_p.V774M; A0301
VDNPHMCR

SEQ ID NO: 23893 - protein, 10 aa, Homo sapiens
  AACR GENIE Results; EGFR_p.V774M; A1101
SVDNPHMCRL

SEQ ID NO: 23894 - protein, 9 aa, Homo sapiens
  AACR GENIE Results; EGFR_p.V834L; A0301
YLEDRRLLH

SEQ ID NO: 23895 - protein, 9 aa, Homo sapiens
  AACR GENIE Results; EP300_p.H2324Pfs*55; B1501
SQPPPLQSF

SEQ ID NO: 23896 - protein, 9 aa, Homo sapiens
  AACR GENIE Results; EP300_p.H2324Pfs*55; B3501
QPGPEFNAF

SEQ ID NO: 23897 - protein, 9 aa, Homo sapiens
  AACR GENIE Results; EP300_p.H2324Pfs*55; B1501
GQPHGTRAF

SEQ ID NO: 23898 - protein, 9 aa, Homo sapiens
  AACR GENIE Results; EP300_p.H2324Pfs*55; B0702
FPKDAASAF

SEQ ID NO: 23899 - protein, 9 aa, Homo sapiens
  AACR GENIE Results; EP300_p.H2324Pfs*55; B3501
FPKDAASAF

SEQ ID NO: 23900 - protein, 10 aa, Homo sapiens
  AACR GENIE Results; EP300_p.H2324Pfs*55; B1501
CQPGPEFNAF

SEQ ID NO: 23901 - protein, 10 aa, Homo sapiens
  AACR GENIE Results; EP300_p.H2324Pfs*55; A6801
DAASAFSTPR

SEQ ID NO: 23902 - protein, 11 aa, Homo sapiens
  AACR GENIE Results; EP300_p.H2324Pfs*55; A1101
SQPPPLQSFPK

SEQ ID NO: 23903 - protein, 9 aa, Homo sapiens
  AACR GENIE Results; EP300_p.H2324Pfs*55; B0702
TPRFPTDKF

SEQ ID NO: 23904 - protein, 9 aa, Homo sapiens
  AACR GENIE Results; EP300_p.H2324Pfs*55; A3201
SQPPPLQSF

SEQ ID NO: 23905 - protein, 9 aa, Homo sapiens
  AACR GENIE Results; EP300_p.H2324Pfs*55; A6801
AASAFSTPR

SEQ ID NO: 23906 - protein, 9 aa, Homo sapiens
  AACR GENIE Results; EP300_p.H2324Pfs*55; B1501
FPKDAASAF

SEQ ID NO: 23907 - protein, 9 aa, Homo sapiens
  AACR GENIE Results; EP300_p.H2324Pfs*55; B0702
QPGPEFNAF

SEQ ID NO: 23908 - protein, 11 aa, Homo sapiens
  AACR GENIE Results; EP300_p.H2324Pfs*55; B1501
QSFPKDAASAF

SEQ ID NO: 23909 - protein, 9 aa, Homo sapiens
  AACR GENIE Results; EP300_p.H2324Pfs*55; A2402
SQPPPLQSF

SEQ ID NO: 23910 - protein, 9 aa, Homo sapiens
  AACR GENIE Results; EP300_p.H2324Pfs*55; A1101
AASAFSTPR

SEQ ID NO: 23911 - protein, 8 aa, Homo sapiens
  AACR GENIE Results; EP300_p.H2324Pfs*55; B5701
TDKFPTSW

SEQ ID NO: 23912 - protein, 11 aa, Homo sapiens
  AACR GENIE Results; EP300_p.H2324Pfs*55; B5701
QSFPKDAASAF

SEQ ID NO: 23913 - protein, 9 aa, Homo sapiens
  AACR GENIE Results; EP300_p.H2324Pfs*55; C0202
FPKDAASAF

SEQ ID NO: 23914 - protein, 10 aa, Homo sapiens
  AACR GENIE Results; EP300_p.H2324Pfs*55; B5701
QSQPPPLQSF

SEQ ID NO: 23915 - protein, 9 aa, Homo sapiens
  AACR GENIE Results; EP300_p.H2324Pfs*55; B5701
ASAFSTPRF

SEQ ID NO: 23916 - protein, 10 aa, Homo sapiens
  AACR GENIE Results; EP300_p.H2324Pfs*55; A2402
CQPGPEFNAF

SEQ ID NO: 23917 - protein, 9 aa, Homo sapiens
  AACR GENIE Results; EP300_p.H2324Pfs*55; B5101
FPKDAASAF

SEQ ID NO: 23918 - protein, 9 aa, Homo sapiens
  AACR GENIE Results; EP300_p.T858A; B1501
AQQPPATAI

SEQ ID NO: 23919 - protein, 11 aa, Homo sapiens
  AACR GENIE Results; EPHA5_p.A966E; B4402
AEHSPLGSGEY

SEQ ID NO: 23920 - protein, 8 aa, Homo sapiens
  AACR GENIE Results; EPHA5_p.A966E; B3501
SPLGSGEY

SEQ ID NO: 23921 - protein, 9 aa, Homo sapiens
  AACR GENIE Results; EPHA5_p.A966E; A0101
HSPLGSGEY

SEQ ID NO: 23922 - protein, 11 aa, Homo sapiens
  AACR GENIE Results; EPHA5_p.A966E; B0702
SPLGSGEYRSV

SEQ ID NO: 23923 - protein, 9 aa, Homo sapiens
  AACR GENIE Results; EPHA5_p.L255F; A0201
FLEVSGSCV

SEQ ID NO: 23924 - protein, 9 aa, Homo sapiens
  AACR GENIE Results; EPHA5_p.M427I; B1501
GLKNTSVIM

SEQ ID NO: 23925 - protein, 9 aa, Homo sapiens
  AACR GENIE Results; EPHA5_p.R227S; B1501
ALVSVSVYY

SEQ ID NO: 23926 - protein, 8 aa, Homo sapiens
  AACR GENIE Results; EPHA5_p.R227S; B1501
ALVSVSVY

SEQ ID NO: 23927 - protein, 9 aa, Homo sapiens
  AACR GENIE Results; EPHA5_p.R227S; B3501
IALVSVSVY

SEQ ID NO: 23928 - protein, 9 aa, Homo sapiens
  AACR GENIE Results; EPHA5_p.R227S; A2902
ALVSVSVYY

SEQ ID NO: 23929 - protein, 9 aa, Homo sapiens
  AACR GENIE Results; EPHA5_p.R227S; A1101
LVSVSVYYK

SEQ ID NO: 23930 - protein, 8 aa, Homo sapiens
  AACR GENIE Results; EPHA5_p.R227S; B5101
IALVSVSV

SEQ ID NO: 23931 - protein, 8 aa, Homo sapiens
  AACR GENIE Results; EPHA5_p.R227S; A1101
VSVSVYYK

SEQ ID NO: 23932 - protein, 9 aa, Homo sapiens
  AACR GENIE Results; EPHA5_p.R227S; B1501
IALVSVSVY

SEQ ID NO: 23933 - protein, 9 aa, Homo sapiens
  AACR GENIE Results; EPHA5_p.R227S; A1101
VSVSVYYKK

SEQ ID NO: 23934 - protein, 9 aa, Homo sapiens
  AACR GENIE Results; EPHA5_p.R227S; A0301
LVSVSVYYK

SEQ ID NO: 23935 - protein, 10 aa, Homo sapiens
  AACR GENIE Results; EPHA5_p.R227S; B5701
IALVSVSVYY

SEQ ID NO: 23936 - protein, 8 aa, Homo sapiens
  AACR GENIE Results; EPHA5_p.R227S; B1501
LVSVSVYY

SEQ ID NO: 23937 - protein, 9 aa, Homo sapiens
  AACR GENIE Results; EPHA5_p.R227S; A0301
ALVSVSVYY

SEQ ID NO: 23938 - protein, 10 aa, Homo sapiens
  AACR GENIE Results; EPHA5_p.R853Q; A6801
TAPEAIAFQK

SEQ ID NO: 23939 - protein, 9 aa, Homo sapiens
  AACR GENIE Results; EPHA5_p.R853Q; A2301
PEAIAFQKF

SEQ ID NO: 23940 - protein, 9 aa, Homo sapiens
  AACR GENIE Results; EPHA5_p.R853Q; C0304
IAFQKFTSA

SEQ ID NO: 23941 - protein, 9 aa, Homo sapiens
  AACR GENIE Results; EPHA5_p.R853Q; C0303
IAFQKFTSA

SEQ ID NO: 23942 - protein, 9 aa, Homo sapiens
  AACR GENIE Results; EPHA5_p.R853Q; B0801
IAFQKFTSA

SEQ ID NO: 23943 - protein, 9 aa, Homo sapiens
  AACR GENIE Results; EPHA5_p.W844C; B1501
CTAPEAIAF

SEQ ID NO: 23944 - protein, 10 aa, Homo sapiens
  AACR GENIE Results; EPHA5_p.W844C; A6801
CTAPEAIAFR

SEQ ID NO: 23945 - protein, 11 aa, Homo sapiens
  AACR GENIE Results; EPHA5_p.W844C; A1101
CTAPEAIAFRK

SEQ ID NO: 23946 - protein, 9 aa, Homo sapiens
  AACR GENIE Results; EPHA5_p.W844C; A1101
CTAPEAIAF

SEQ ID NO: 23947 - protein, 9 aa, Homo sapiens
  AACR GENIE Results; EPHA5_p.W844C; B3501
CTAPEAIAF

SEQ ID NO: 23948 - protein, 9 aa, Homo sapiens
  AACR GENIE Results; EPHA7_p.R486M; B0801
DQMERTYST

SEQ ID NO: 23949 - protein, 10 aa, Homo sapiens
  AACR GENIE Results; EPHA7_p.R486M; B4402
YEKDQMERTY

SEQ ID NO: 23950 - protein, 10 aa, Homo sapiens
  AACR GENIE Results; EPHA7_p.R69Q; B1801
DENYTPIQTY

SEQ ID NO: 23951 - protein, 10 aa, Homo sapiens
  AACR GENIE Results; EPHA7_p.R69Q; B4403
DENYTPIQTY

SEQ ID NO: 23952 - protein, 10 aa, Homo sapiens
  AACR GENIE Results; EPHA7_p.R69Q; B4402
DENYTPIQTY

SEQ ID NO: 23953 - protein, 8 aa, Homo sapiens
  AACR GENIE Results; EPHA7_p.R69Q; B5101
TPIQTYQV

SEQ ID NO: 23954 - protein, 9 aa, Homo sapiens
  AACR GENIE Results; EPHB1_p.A922T; A3101
STIKMVQYR

SEQ ID NO: 23955 - protein, 9 aa, Homo sapiens
  AACR GENIE Results; EPHB1_p.A922T; C0802
TVDDWLSTI

SEQ ID NO: 23956 - protein, 9 aa, Homo sapiens
  AACR GENIE Results; EPHB1_p.A922T; C1601
LSTIKMVQY

SEQ ID NO: 23957 - protein, 9 aa, Homo sapiens
  AACR GENIE Results; EPHB1_p.A922T; A1101
STIKMVQYR

SEQ ID NO: 23958 - protein, 8 aa, Homo sapiens
  AACR GENIE Results; EPHB1_p.A922T; B1501
STIKMVQY

SEQ ID NO: 23959 - protein, 9 aa, Homo sapiens
  AACR GENIE Results; EPHB1_p.A922T; A6801
STIKMVQYR

SEQ ID NO: 23960 - protein, 10 aa, Homo sapiens
  AACR GENIE Results; EPHB1_p.R222Q; A6802
STSLVIAQGT

SEQ ID NO: 23961 - protein, 10 aa, Homo sapiens
  AACR GENIE Results; ERBB2_p.D769Y; A0301
ILYEAYVMAG

SEQ ID NO: 23962 - protein, 8 aa, Homo sapiens
  AACR GENIE Results; ERBB2_p.G776V; B1801
DEAYVMAV

SEQ ID NO: 23963 - protein, 10 aa, Homo sapiens
  AACR GENIE Results; ERBB2_p.G776V; A6801
AVVGSPYVSR

SEQ ID NO: 23964 - protein, 8 aa, Homo sapiens
  AACR GENIE Results; ERBB2_p.G776V; B5101
EAYVMAVV

SEQ ID NO: 23965 - protein, 9 aa, Homo sapiens
  AACR GENIE Results; ERBB2_p.G776V; A3101
VVGSPYVSR

SEQ ID NO: 23966 - protein, 9 aa, Homo sapiens
  AACR GENIE Results; ERBB2_p.G776V; A6801
VVGSPYVSR

SEQ ID NO: 23967 - protein, 9 aa, Homo sapiens
  AACR GENIE Results; ERBB2_p.G776V; B1501
VMAVVGSPY

SEQ ID NO: 23968 - protein, 9 aa, Homo sapiens
  AACR GENIE Results; ERBB2_p.G776V; A1101
VVGSPYVSR

SEQ ID NO: 23969 - protein, 10 aa, Homo sapiens
  AACR GENIE Results; ERBB2_p.G776V; A1101
AVVGSPYVSR

SEQ ID NO: 23970 - protein, 9 aa, Homo sapiens
  AACR GENIE Results; ERBB2_p.G776V; A0301
VVGSPYVSR

SEQ ID NO: 23971 - protein, 9 aa, Homo sapiens
  AACR GENIE Results; ERBB2_p.G776V; B1801
DEAYVMAVV

SEQ ID NO: 23972 - protein, 10 aa, Homo sapiens
  AACR GENIE Results; ERBB2_p.G776V; A0201
ILDEAYVMAV

SEQ ID NO: 23973 - protein, 10 aa, Homo sapiens
  AACR GENIE Results; ERBB2_p.G776V; A3101
AVVGSPYVSR

SEQ ID NO: 23974 - protein, 9 aa, Homo sapiens
  AACR GENIE Results; ERBB2_p.G776V; B5101
MAVVGSPYV

SEQ ID NO: 23975 - protein, 11 aa, Homo sapiens
  AACR GENIE Results; ERBB2_p.G776V; A6801
MAVVGSPYVSR

SEQ ID NO: 23976 - protein, 10 aa, Homo sapiens
  AACR GENIE Results; ERBB2_p.G776V; A0301
AVVGSPYVSR

SEQ ID NO: 23977 - protein, 10 aa, Homo sapiens
  AACR GENIE Results; ERBB2_p.G776V; B3501
YVMAVVGSPY

SEQ ID NO: 23978 - protein, 10 aa, Homo sapiens
  AACR GENIE Results; ERBB2_p.G776V; B1801
DEAYVMAVVG

SEQ ID NO: 23979 - protein, 8 aa, Homo sapiens
  AACR GENIE Results; ERBB2_p.G776V; B1302
AVVGSPYV

SEQ ID NO: 23980 - protein, 10 aa, Homo sapiens
  AACR GENIE Results; ERBB2_p.G776V; A2601
YVMAVVGSPY

SEQ ID NO: 23981 - protein, 9 aa, Homo sapiens
  AACR GENIE Results; ERBB2_p.G776V; A2902
VMAVVGSPY

SEQ ID NO: 23982 - protein, 10 aa, Homo sapiens
  AACR GENIE Results; ERBB2_p.G776V; A0201
VMAVVGSPYV

SEQ ID NO: 23983 - protein, 8 aa, Homo sapiens
  AACR GENIE Results; ERBB2_p.G776V; B3501
MAVVGSPY

SEQ ID NO: 23984 - protein, 10 aa, Homo sapiens
  AACR GENIE Results; ERBB2_p.G776V; B1501
YVMAVVGSPY

SEQ ID NO: 23985 - protein, 10 aa, Homo sapiens
  AACR GENIE Results; ERBB2_p.G776V; A2601
AVVGSPYVSR

SEQ ID NO: 23986 - protein, 11 aa, Homo sapiens
  AACR GENIE Results; ERBB2_p.G778_P780dup; A3101
VGSPGSPYVSR

SEQ ID NO: 23987 - protein, 9 aa, Homo sapiens
  AACR GENIE Results; ERBB2_p.G778_P780dup; B1501
GVGSPGSPY

SEQ ID NO: 23988 - protein, 11 aa, Homo sapiens
  AACR GENIE Results; ERBB2_p.G778_P780dup; A6801
VGSPGSPYVSR

SEQ ID NO: 23989 - protein, 9 aa, Homo sapiens
  AACR GENIE Results; ERBB2_p.G778_P780dup; B5101
VGSPGSPYV

SEQ ID NO: 23990 - protein, 10 aa, Homo sapiens
  AACR GENIE Results; ERBB2_p.G778_P780dup; B1501
AGVGSPGSPY

SEQ ID NO: 23991 - protein, 9 aa, Homo sapiens
  AACR GENIE Results; ERBB2_p.G778_P780dup; B1302
VGSPGSPYV

SEQ ID NO: 23992 - protein, 9 aa, Homo sapiens
  AACR GENIE Results; ERBB2_p.G778_P780dup; A6801
SPGSPYVSR

SEQ ID NO: 23993 - protein, 10 aa, Homo sapiens
  AACR GENIE Results; ERBB2_p.G778_P780dup; B0702
SPGSPYVSRL

SEQ ID NO: 23994 - protein, 10 aa, Homo sapiens
  AACR GENIE Results; ERBB2_p.G778_P780dup; A6801
GSPGSPYVSR

SEQ ID NO: 23995 - protein, 9 aa, Homo sapiens
  AACR GENIE Results; ERBB2_p.G778_P780dup; A0201
VGSPGSPYV

SEQ ID NO: 23996 - protein, 11 aa, Homo sapiens
  AACR GENIE Results; ERBB2_p.G778_P780dup; A1101
VGSPGSPYVSR

SEQ ID NO: 23997 - protein, 10 aa, Homo sapiens
  AACR GENIE Results; ERBB2_p.G778_P780dup; B3501
AGVGSPGSPY

SEQ ID NO: 23998 - protein, 10 aa, Homo sapiens
  AACR GENIE Results; ERBB2_p.L755A; A0301
KVARENTSPK

SEQ ID NO: 23999 - protein, 9 aa, Homo sapiens
  AACR GENIE Results; ERBB2_p.L755A; A0301
VARENTSPK

SEQ ID NO: 24000 - protein, 9 aa, Homo sapiens
  AACR GENIE Results; ERBB2_p.L755P; A6801
IPVAIKVPR

SEQ ID NO: 24001 - protein, 10 aa, Homo sapiens
  AACR GENIE Results; ERBB2_p.L755P; A0301
KVPRENTSPK

SEQ ID NO: 24002 - protein, 10 aa, Homo sapiens
  AACR GENIE Results; ERBB2_p.L755P; B0702
VPRENTSPKA

SEQ ID NO: 24003 - protein, 10 aa, Homo sapiens
  AACR GENIE Results; ERBB2_p.L755P; A1101
KVPRENTSPK

SEQ ID NO: 24004 - protein, 9 aa, Homo sapiens
  AACR GENIE Results; ERBB2_p.L755S; A6801
IPVAIKVSR

SEQ ID NO: 24005 - protein, 9 aa, Homo sapiens
  AACR GENIE Results; ERBB2_p.L755S; A0301
VSRENTSPK

SEQ ID NO: 24006 - protein, 9 aa, Homo sapiens
  AACR GENIE Results; ERBB2_p.Q709L; B0702
TPSGAMPNL

SEQ ID NO: 24007 - protein, 9 aa, Homo sapiens
  AACR GENIE Results; ERBB2_p.Q709L; B3501
TPSGAMPNL

SEQ ID NO: 24008 - protein, 8 aa, Homo sapiens
  AACR GENIE Results; ERBB2_p.R678Q; B1501
QQQKIRKY

SEQ ID NO: 24009 - protein, 9 aa, Homo sapiens
  AACR GENIE Results; ERBB2_p.S310F; C0802
STDVGFCTL

SEQ ID NO: 24010 - protein, 9 aa, Homo sapiens
  AACR GENIE Results; ERBB2_p.S310F; A2301
NYLSTDVGF

SEQ ID NO: 24011 - protein, 9 aa, Homo sapiens
  AACR GENIE Results; ERBB2_p.S310F; C0501
STDVGFCTL

SEQ ID NO: 24012 - protein, 9 aa, Homo sapiens
  AACR GENIE Results; ERBB2_p.S310F; A2402
NYLSTDVGF

SEQ ID NO: 24013 - protein, 9 aa, Homo sapiens
  AACR GENIE Results; ERBB2_p.S310F; C0304
STDVGFCTL

SEQ ID NO: 24014 - protein, 9 aa, Homo sapiens
  AACR GENIE Results; ERBB2_p.V659E; C1203
SAVEGILLV

SEQ ID NO: 24015 - protein, 9 aa, Homo sapiens
  AACR GENIE Results; ERBB2_p.V659E; B5101
SAVEGILLV

SEQ ID NO: 24016 - protein, 8 aa, Homo sapiens
  AACR GENIE Results; ERBB2_p.V659E; C0304
SAVEGILL

SEQ ID NO: 24017 - protein, 9 aa, Homo sapiens
  AACR GENIE Results; ERBB2_p.V659E; A0201
SIISAVEGI

SEQ ID NO: 24018 - protein, 9 aa, Homo sapiens
  AACR GENIE Results; ERBB2_p.V777L; B1801
DEAYVMAGL

SEQ ID NO: 24019 - protein, 9 aa, Homo sapiens
  AACR GENIE Results; ERBB2_p.V777L; B1501
VMAGLGSPY

SEQ ID NO: 24020 - protein, 8 aa, Homo sapiens
  AACR GENIE Results; ERBB2_p.V777L; B5101
EAYVMAGL

SEQ ID NO: 24021 - protein, 10 aa, Homo sapiens
  AACR GENIE Results; ERBB2_p.V777L; A2601
YVMAGLGSPY

SEQ ID NO: 24022 - protein, 10 aa, Homo sapiens
  AACR GENIE Results; ERBB2_p.V777L; A3101
AGLGSPYVSR

SEQ ID NO: 24023 - protein, 9 aa, Homo sapiens
  AACR GENIE Results; ERBB2_p.V777L; A3101
GLGSPYVSR

SEQ ID NO: 24024 - protein, 10 aa, Homo sapiens
  AACR GENIE Results; ERBB2_p.V777L; A0201
VMAGLGSPYV

SEQ ID NO: 24025 - protein, 9 aa, Homo sapiens
  AACR GENIE Results; ERBB2_p.V777L; A0301
GLGSPYVSR

SEQ ID NO: 24026 - protein, 10 aa, Homo sapiens
  AACR GENIE Results; ERBB2_p.V777L; B1501
YVMAGLGSPY

SEQ ID NO: 24027 - protein, 11 aa, Homo sapiens
  AACR GENIE Results; ERBB2_p.V777L; A3303
MAGLGSPYVSR

SEQ ID NO: 24028 - protein, 9 aa, Homo sapiens
  AACR GENIE Results; ERBB2_p.V777L; B2702
GLGSPYVSR

SEQ ID NO: 24029 - protein, 11 aa, Homo sapiens
  AACR GENIE Results; ERBB2_p.V777L; A6801
MAGLGSPYVSR

SEQ ID NO: 24030 - protein, 8 aa, Homo sapiens
  AACR GENIE Results; ERBB2_p.V777L; B1302
AGLGSPYV

SEQ ID NO: 24031 - protein, 10 aa, Homo sapiens
  AACR GENIE Results; ERBB2_p.V777L; B2702
AGLGSPYVSR

SEQ ID NO: 24032 - protein, 10 aa, Homo sapiens
  AACR GENIE Results; ERBB2_p.V777L; B3501
YVMAGLGSPY

SEQ ID NO: 24033 - protein, 10 aa, Homo sapiens
  AACR GENIE Results; ERBB2_p.V777L; A0301
GLGSPYVSRL

SEQ ID NO: 24034 - protein, 9 aa, Homo sapiens
  AACR GENIE Results; ERBB2_p.V842I; A2402
SYLEDVRLI

SEQ ID NO: 24035 - protein, 9 aa, Homo sapiens
  AACR GENIE Results; ERBB2_p.V842I; A2301
SYLEDVRLI

SEQ ID NO: 24036 - protein, 11 aa, Homo sapiens
  AACR GENIE Results; ERBB2_p.V842I; A3101
SYLEDVRLIHR

SEQ ID NO: 24037 - protein, 9 aa, Homo sapiens
  AACR GENIE Results; ERBB2_p.V842I; C0602
SYLEDVRLI

SEQ ID NO: 24038 - protein, 9 aa, Homo sapiens
  AACR GENIE Results; ERBB2_p.V842I; C1402
SYLEDVRLI

SEQ ID NO: 24039 - protein, 11 aa, Homo sapiens
  AACR GENIE Results; ERBB2_p.V842I; A3303
SYLEDVRLIHR

SEQ ID NO: 24040 - protein, 8 aa, Homo sapiens
  AACR GENIE Results; ERBB2_p.Y772_A775dup; B1801
DEAYVMAY

SEQ ID NO: 24041 - protein, 8 aa, Homo sapiens
  AACR GENIE Results; ERBB2_p.Y772_A775dup; B5101
EAYVMAYV

SEQ ID NO: 24042 - protein, 10 aa, Homo sapiens
  AACR GENIE Results; ERBB2_p.Y772_A775dup; A0101
ILDEAYVMAY

SEQ ID NO: 24043 - protein, 8 aa, Homo sapiens
  AACR GENIE Results; ERBB2_p.Y772_A775dup; B5101
MAYVMAGV

SEQ ID NO: 24044 - protein, 9 aa, Homo sapiens
  AACR GENIE Results; ERBB2_p.Y772_A775dup; B3501
EAYVMAYVM

SEQ ID NO: 24045 - protein, 9 aa, Homo sapiens
  AACR GENIE Results; ERBB2_p.Y772_A775dup; B1502
EAYVMAYVM

SEQ ID NO: 24046 - protein, 9 aa, Homo sapiens
  AACR GENIE Results; ERBB2_p.Y772_A775dup; B3503
EAYVMAYVM

SEQ ID NO: 24047 - protein, 9 aa, Homo sapiens
  AACR GENIE Results; ERBB2_p.Y772_A775dup; B5101
EAYVMAYVM

SEQ ID NO: 24048 - protein, 9 aa, Homo sapiens
  AACR GENIE Results; ERBB2_p.Y772_A775dup; A0201
VMAYVMAGV

SEQ ID NO: 24049 - protein, 9 aa, Homo sapiens
  AACR GENIE Results; ERBB2_p.Y772_A775dup; A6802
DEAYVMAYV

SEQ ID NO: 24050 - protein, 8 aa, Homo sapiens
  AACR GENIE Results; ERBB2_p.Y772_A775dup; C0302
DEAYVMAY

SEQ ID NO: 24051 - protein, 9 aa, Homo sapiens
  AACR GENIE Results; ERBB2_p.Y772_A775dup; C0801
EAYVMAYVM

SEQ ID NO: 24052 - protein, 10 aa, Homo sapiens
  AACR GENIE Results; ERBB2_p.Y772_A775dup; B1801
DEAYVMAYVM

SEQ ID NO: 24053 - protein, 8 aa, Homo sapiens
  AACR GENIE Results; ERBB2_p.Y772_A775dup; A2301
DEAYVMAY

SEQ ID NO: 24054 - protein, 8 aa, Homo sapiens
  AACR GENIE Results; ERBB2_p.Y772_A775dup; B1502
DEAYVMAY

SEQ ID NO: 24055 - protein, 8 aa, Homo sapiens
  AACR GENIE Results; ERBB2_p.Y772_A775dup; C1402
AYVMAYVM

SEQ ID NO: 24056 - protein, 9 aa, Homo sapiens
  AACR GENIE Results; ERBB2_p.Y772_A775dup; B1302
VMAYVMAGV

SEQ ID NO: 24057 - protein, 8 aa, Homo sapiens
  AACR GENIE Results; ERBB2_p.Y772_A775dup; B4403
DEAYVMAY

SEQ ID NO: 24058 - protein, 11 aa, Homo sapiens
  AACR GENIE Results; ERBB2_p.Y772_A775dup; A2601
EILDEAYVMAY

SEQ ID NO: 24059 - protein, 9 aa, Homo sapiens
  AACR GENIE Results; ERBB2_p.Y772_A775dup; A6802
EAYVMAYVM

SEQ ID NO: 24060 - protein, 9 aa, Homo sapiens
  AACR GENIE Results; ERBB2_p.Y772_A775dup; B4901
DEAYVMAYV

SEQ ID NO: 24061 - protein, 8 aa, Homo sapiens
  AACR GENIE Results; ERBB2_p.Y772_A775dup; B5801
DEAYVMAY

SEQ ID NO: 24062 - protein, 9 aa, Homo sapiens
  AACR GENIE Results; ERBB2_p.Y772_A775dup; B1801
LDEAYVMAY

SEQ ID NO: 24063 - protein, 8 aa, Homo sapiens
  AACR GENIE Results; ERBB2_p.Y772_A775dup; A2301
AYVMAYVM

SEQ ID NO: 24064 - protein, 10 aa, Homo sapiens
  AACR GENIE Results; ERBB2_p.Y772_A775dup; A6802
YVMAYVMAGV

SEQ ID NO: 24065 - protein, 10 aa, Homo sapiens
  AACR GENIE Results; ERBB2_p.Y772_A775dup; B1502
ILDEAYVMAY

SEQ ID NO: 24066 - protein, 9 aa, Homo sapiens
  AACR GENIE Results; ERBB3_p.D297Y; A0301
VVYQTSCVR

SEQ ID NO: 24067 - protein, 9 aa, Homo sapiens
  AACR GENIE Results; ERBB3_p.D297Y; A3101
VVYQTSCVR

SEQ ID NO: 24068 - protein, 9 aa, Homo sapiens
  AACR GENIE Results; ERBB3_p.D297Y; A1101
VVYQTSCVR

SEQ ID NO: 24069 - protein, 8 aa, Homo sapiens
  AACR GENIE Results; ERBB3_p.D297Y; B5101
VVYQTSCV

SEQ ID NO: 24070 - protein, 8 aa, Homo sapiens
  AACR GENIE Results; ERBB3_p.D297Y; B3501
CPHNFVVY

SEQ ID NO: 24071 - protein, 9 aa, Homo sapiens
  AACR GENIE Results; ERBB3_p.D297Y; A6801
VVYQTSCVR

SEQ ID NO: 24072 - protein, 9 aa, Homo sapiens
  AACR GENIE Results; ERBB3_p.I649R; C0602
VRAGLVVIF

SEQ ID NO: 24073 - protein, 9 aa, Homo sapiens
  AACR GENIE Results; ERBB3_p.I649R; C0702
VRAGLVVIF

SEQ ID NO: 24074 - protein, 9 aa, Homo sapiens
  AACR GENIE Results; ERBB3_p.S846I; A0201
VLLKSPIQV

SEQ ID NO: 24075 - protein, 10 aa, Homo sapiens
  AACR GENIE Results; ERBB3_p.S846I; B3501
SPIQVQVADF

SEQ ID NO: 24076 - protein, 9 aa, Homo sapiens
  AACR GENIE Results; ERBB3_p.S846I; C0602
LKSPIQVQV

SEQ ID NO: 24077 - protein, 9 aa, Homo sapiens
  AACR GENIE Results; ERBB3_p.V104L; B5101
LPLPNLRLV

SEQ ID NO: 24078 - protein, 9 aa, Homo sapiens
  AACR GENIE Results; ERBB3_p.V104L; B1501
RLVRGTQVY

SEQ ID NO: 24079 - protein, 8 aa, Homo sapiens
  AACR GENIE Results; ERBB3_p.V104L; B1501
LVRGTQVY

SEQ ID NO: 24080 - protein, 9 aa, Homo sapiens
  AACR GENIE Results; ERBB3_p.V104M; B5101
LPLPNLRMV

SEQ ID NO: 24081 - protein, 8 aa, Homo sapiens
  AACR GENIE Results; ERBB3_p.V104M; B1501
MVRGTQVY

SEQ ID NO: 24082 - protein, 9 aa, Homo sapiens
  AACR GENIE Results; ERBB3_p.V104M; B1501
RMVRGTQVY

SEQ ID NO: 24083 - protein, 8 aa, Homo sapiens
  AACR GENIE Results; ERBB3_p.V104M; A2601
MVRGTQVY

SEQ ID NO: 24084 - protein, 9 aa, Homo sapiens
  AACR GENIE Results; ERBB4_p.E1201K; A2402
KYVNEPLYL

SEQ ID NO: 24085 - protein, 9 aa, Homo sapiens
  AACR GENIE Results; ERBB4_p.E1201K; C0702
KYVNEPLYL

SEQ ID NO: 24086 - protein, 9 aa, Homo sapiens
  AACR GENIE Results; ERBB4_p.E1201K; C0602
KYVNEPLYL

SEQ ID NO: 24087 - protein, 9 aa, Homo sapiens
  AACR GENIE Results; ERBB4_p.R1040T; C0501
TIDSNRSEI

SEQ ID NO: 24088 - protein, 9 aa, Homo sapiens
  AACR GENIE Results; ERBB4_p.R1040T; B0702
TIDSNRSEI

SEQ ID NO: 24089 - protein, 8 aa, Homo sapiens
  AACR GENIE Results; ERBB4_p.R847H; B1402
DLAAHNVL

SEQ ID NO: 24090 - protein, 8 aa, Homo sapiens
  AACR GENIE Results; ERBB4_p.R847H; B0801
DLAAHNVL

SEQ ID NO: 24091 - protein, 8 aa, Homo sapiens
  AACR GENIE Results; ERBB4_p.R847H; B3701
RDLAAHNV

SEQ ID NO: 24092 - protein, 9 aa, Homo sapiens
  AACR GENIE Results; ERBB4_p.R847H; B3701
RDLAAHNVL

SEQ ID NO: 24093 - protein, 8 aa, Homo sapiens
  AACR GENIE Results; ERBB4_p.R847H; A1101
AAHNVLVK

SEQ ID NO: 24094 - protein, 9 aa, Homo sapiens
  AACR GENIE Results; ERBB4_p.R847H; B4002
RDLAAHNVL

SEQ ID NO: 24095 - protein, 9 aa, Homo sapiens
  AACR GENIE Results; ERBB4_p.R847H; A6802
DLAAHNVLV

SEQ ID NO: 24096 - protein, 8 aa, Homo sapiens
  AACR GENIE Results; ERBB4_p.R847H; A0301
AAHNVLVK

SEQ ID NO: 24097 - protein, 9 aa, Homo sapiens
  AACR GENIE Results; ERBB4_p.R847H; B1402
RDLAAHNVL

SEQ ID NO: 24098 - protein, 9 aa, Homo sapiens
  AACR GENIE Results; ERBB4_p.S1046I; C0501
RIDSNRIEI

SEQ ID NO: 24099 - protein, 11 aa, Homo sapiens
  AACR GENIE Results; ERBB4_p.S1046I; B4403
IEIGHSPPPAY

SEQ ID NO: 24100 - protein, 9 aa, Homo sapiens
  AACR GENIE Results; ERBB4_p.S1046I; A0301
RIDSNRIEI

SEQ ID NO: 24101 - protein, 11 aa, Homo sapiens
  AACR GENIE Results; ERBB4_p.S1046I; B1501
IEIGHSPPPAY

SEQ ID NO: 24102 - protein, 9 aa, Homo sapiens
  AACR GENIE Results; ERBB4_p.S774R; B1801
DEALIMARM

SEQ ID NO: 24103 - protein, 9 aa, Homo sapiens
  AACR GENIE Results; ERBB4_p.S774R; C0602
ARMDHPHLV

SEQ ID NO: 24104 - protein, 9 aa, Homo sapiens
  AACR GENIE Results; ERBB4_p.S774R; B2705
ARMDHPHLV

SEQ ID NO: 24105 - protein, 8 aa, Homo sapiens
  AACR GENIE Results; ERBB4_p.S774R; B1801
DEALIMAR

SEQ ID NO: 24106 - protein, 9 aa, Homo sapiens
  AACR GENIE Results; ERBB4_p.S774R; B4403
DEALIMARM

SEQ ID NO: 24107 - protein, 8 aa, Homo sapiens
  AACR GENIE Results; ERBB4_p.S774R; B5101
EALIMARM

SEQ ID NO: 24108 - protein, 9 aa, Homo sapiens
  AACR GENIE Results; ERBB4_p.S774R; A2301
DEALIMARM

SEQ ID NO: 24109 - protein, 9 aa, Homo sapiens
  AACR GENIE Results; ERBB4_p.S774R; A3101
RMDHPHLVR

SEQ ID NO: 24110 - protein, 9 aa, Homo sapiens
  AACR GENIE Results; ERBB4_p.S774R; A0301
RMDHPHLVR

SEQ ID NO: 24111 - protein, 8 aa, Homo sapiens
  AACR GENIE Results; ERBB4_p.T926M; B5101
DGIPMREI

SEQ ID NO: 24112 - protein, 9 aa, Homo sapiens
  AACR GENIE Results; ERBB4_p.T926M; B3501
IPMREIPDL

SEQ ID NO: 24113 - protein, 9 aa, Homo sapiens
  AACR GENIE Results; ERCC3_p.G587V; A0201
YIYGPTSQV

SEQ ID NO: 24114 - protein, 11 aa, Homo sapiens
  AACR GENIE Results; ERCC3_p.G587V; A1101
YIYGPTSQVER

SEQ ID NO: 24115 - protein, 9 aa, Homo sapiens
  AACR GENIE Results; ERCC3_p.G587V; B3501
GPTSQVERM

SEQ ID NO: 24116 - protein, 11 aa, Homo sapiens
  AACR GENIE Results; ERCC3_p.G587V; A2402
IYGPTSQVERM

SEQ ID NO: 24117 - protein, 8 aa, Homo sapiens
  AACR GENIE Results; ERCC4_p.E527D; B1801
DEIKHEEF

SEQ ID NO: 24118 - protein, 9 aa, Homo sapiens
  AACR GENIE Results; ERCC4_p.Q322H; B5701
KAFGHNSGW

SEQ ID NO: 24119 - protein, 8 aa, Homo sapiens
  AACR GENIE Results; ERCC4_p.Q406R; C0304
LGGPGRVL

SEQ ID NO: 24120 - protein, 11 aa, Homo sapiens
  AACR GENIE Results; ERCC4_p.Q406R; B4001
SEALGGPGRVL

SEQ ID NO: 24121 - protein, 10 aa, Homo sapiens
  AACR GENIE Results; ERCC4_p.R618H; B4001
TEEQHYLTAL

SEQ ID NO: 24122 - protein, 9 aa, Homo sapiens
  AACR GENIE Results; ERCC4_p.R618H; B1801
EEQHYLTAL

SEQ ID NO: 24123 - protein, 9 aa, Homo sapiens
  AACR GENIE Results; ERCC4_p.R618H; B4001
EEQHYLTAL

SEQ ID NO: 24124 - protein, 9 aa, Homo sapiens
  AACR GENIE Results; ERCC4_p.S540L; B4403
EEFDVNLSL

SEQ ID NO: 24125 - protein, 9 aa, Homo sapiens
  AACR GENIE Results; ERCC4_p.S540L; B4001
EEFDVNLSL

SEQ ID NO: 24126 - protein, 9 aa, Homo sapiens
  AACR GENIE Results; ERCC4_p.S540L; B1801
EEFDVNLSL

SEQ ID NO: 24127 - protein, 10 aa, Homo sapiens
  AACR GENIE Results; ERCC4_p.S540L; A1101
SLDAAFGILK

SEQ ID NO: 24128 - protein, 9 aa, Homo sapiens
  AACR GENIE Results; ERCC5_p.T105A; C0602
SRKATEKLL

SEQ ID NO: 24129 - protein, 11 aa, Homo sapiens
  AACR GENIE Results; ERCC5_p.T105A; A1101
ATEKLLKTFLK

SEQ ID NO: 24130 - protein, 9 aa, Homo sapiens
  AACR GENIE Results; ERG_p.E39Q; B0702
TPHLAKTQM

SEQ ID NO: 24131 - protein, 11 aa, Homo sapiens
  AACR GENIE Results; ERG_p.E39Q; B1501
TQMTASSSSDY

SEQ ID NO: 24132 - protein, 9 aa, Homo sapiens
  AACR GENIE Results; ERG_p.E39Q; B3501
TPHLAKTQM

SEQ ID NO: 24133 - protein, 9 aa, Homo sapiens
  AACR GENIE Results; ERG_p.E39Q; B0801
TPHLAKTQM

SEQ ID NO: 24134 - protein, 10 aa, Homo sapiens
  AACR GENIE Results; ERG_p.E39Q; B1501
QMTASSSSDY

SEQ ID NO: 24135 - protein, 11 aa, Homo sapiens
  AACR GENIE Results; ESR1_p.L35M; B3501
IPMERPLGEVY

SEQ ID NO: 24136 - protein, 9 aa, Homo sapiens
  AACR GENIE Results; ESR1_p.L35M; B1801
MERPLGEVY

SEQ ID NO: 24137 - protein, 10 aa, Homo sapiens
  AACR GENIE Results; ESR1_p.L35M; B5101
IPMERPLGEV

SEQ ID NO: 24138 - protein, 9 aa, Homo sapiens
  AACR GENIE Results; ESR1_p.L35M; B4403
MERPLGEVY

SEQ ID NO: 24139 - protein, 9 aa, Homo sapiens
  AACR GENIE Results; ESR1_p.L35M; B4402
MERPLGEVY

SEQ ID NO: 24140 - protein, 10 aa, Homo sapiens
  AACR GENIE Results; ESR1_p.L35M; B0702
IPMERPLGEV

SEQ ID NO: 24141 - protein, 9 aa, Homo sapiens
  AACR GENIE Results; ESR1_p.S106G; C0102
VSPGPLMLL

SEQ ID NO: 24142 - protein, 9 aa, Homo sapiens
  AACR GENIE Results; ESR1_p.S106G; C0304
NSVSPGPLM

SEQ ID NO: 24143 - protein, 9 aa, Homo sapiens
  AACR GENIE Results; ESR1_p.S106G; C0303
NSVSPGPLM

SEQ ID NO: 24144 - protein, 10 aa, Homo sapiens
  AACR GENIE Results; ESR1_p.T311M; A0201
SLMADQMVSA

SEQ ID NO: 24145 - protein, 9 aa, Homo sapiens
  AACR GENIE Results; ESR1_p.T311M; C0501
MADQMVSAL

SEQ ID NO: 24146 - protein, 9 aa, Homo sapiens
  AACR GENIE Results; ESR1_p.T311M; A0201
LMADQMVSA

SEQ ID NO: 24147 - protein, 9 aa, Homo sapiens
  AACR GENIE Results; ESR1_p.T311M; B3501
MADQMVSAL

SEQ ID NO: 24148 - protein, 9 aa, Homo sapiens
  AACR GENIE Results; ESR1_p.T311M; C0304
MADQMVSAL

SEQ ID NO: 24149 - protein, 9 aa, Homo sapiens
  AACR GENIE Results; ETV1_p.R205M; B3501
MPMEGRPMY

SEQ ID NO: 24150 - protein, 9 aa, Homo sapiens
  AACR GENIE Results; ETV4_p.E30K; A0301
KALIGPLGK

SEQ ID NO: 24151 - protein, 10 aa, Homo sapiens
  AACR GENIE Results; ETV4_p.E30K; A1101
KSPGNGSLRK

SEQ ID NO: 24152 - protein, 10 aa, Homo sapiens
  AACR GENIE Results; ETV4_p.E30K; A0301
KALIGPLGKL

SEQ ID NO: 24153 - protein, 9 aa, Homo sapiens
  AACR GENIE Results; ETV4_p.E30K; A1101
KALIGPLGK

SEQ ID NO: 24154 - protein, 9 aa, Homo sapiens
  AACR GENIE Results; EZH2_p.P219S; C0802
SSDKIFEAI

SEQ ID NO: 24155 - protein, 9 aa, Homo sapiens
  AACR GENIE Results; FANCC_p.D23Ifs*23; B5701
PSKTPVFTW

SEQ ID NO: 24156 - protein, 8 aa, Homo sapiens
  AACR GENIE Results; FANCC_p.D23Ifs*23; A2301
VWIRLPLW

SEQ ID NO: 24157 - protein, 10 aa, Homo sapiens
  AACR GENIE Results; FANCC_p.D23Ifs*23; B5701
LSVWIRLPLW

SEQ ID NO: 24158 - protein, 9 aa, Homo sapiens
  AACR GENIE Results; FANCC_p.D23Ifs*23; B5701
SVWIRLPLW

SEQ ID NO: 24159 - protein, 8 aa, Homo sapiens
  AACR GENIE Results; FANCC_p.D23Ifs*23; B0702
KPSKTPVF

SEQ ID NO: 24160 - protein, 10 aa, Homo sapiens
  AACR GENIE Results; FANCC_p.F275L; A3001
LIKDSSLPQA

SEQ ID NO: 24161 - protein, 10 aa, Homo sapiens
  AACR GENIE Results; FANCC_p.M350V; B5101
FPYTSPSLAV

SEQ ID NO: 24162 - protein, 11 aa, Homo sapiens
  AACR GENIE Results; FANCC_p.M350V; B5101
FPYTSPSLAVV

SEQ ID NO: 24163 - protein, 9 aa, Homo sapiens
  AACR GENIE Results; FANCC_p.M350V; B0702
SPSLAVVLL

SEQ ID NO: 24164 - protein, 8 aa, Homo sapiens
  AACR GENIE Results; FANCC_p.M350V; B0702
SPSLAVVL

SEQ ID NO: 24165 - protein, 9 aa, Homo sapiens
  AACR GENIE Results; FANCC_p.M350V; C0102
TSPSLAVVL

SEQ ID NO: 24166 - protein, 10 aa, Homo sapiens
  AACR GENIE Results; FANCC_p.M350V; B3501
FPYTSPSLAV

SEQ ID NO: 24167 - protein, 8 aa, Homo sapiens
  AACR GENIE Results; FANCC_p.Q3H; B3502
MAHDSVDL

SEQ ID NO: 24168 - protein, 8 aa, Homo sapiens
  AACR GENIE Results; FANCD2_p.S441N; B1501
AQNLLHSL

SEQ ID NO: 24169 - protein, 9 aa, Homo sapiens
  AACR GENIE Results; FANCD2_p.S441N; C0303
LAQNLLHSL

SEQ ID NO: 24170 - protein, 9 aa, Homo sapiens
  AACR GENIE Results; FANCD2_p.S441N; C0304
LAQNLLHSL

SEQ ID NO: 24171 - protein, 10 aa, Homo sapiens
  AACR GENIE Results; FANCD2_p.S441N; A0201
SLAQNLLHSL

SEQ ID NO: 24172 - protein, 9 aa, Homo sapiens
  AACR GENIE Results; FANCD2_p.S441N; C1601
LAQNLLHSL

SEQ ID NO: 24173 - protein, 9 aa, Homo sapiens
  AACR GENIE Results; FANCD2_p.S441N; C1203
LAQNLLHSL

SEQ ID NO: 24174 - protein, 9 aa, Homo sapiens
  AACR GENIE Results; FANCD2_p.S441N; A0201
ILSLAQNLL

SEQ ID NO: 24175 - protein, 8 aa, Homo sapiens
  AACR GENIE Results; FANCD2_p.S441N; B0801
AQNLLHSL

SEQ ID NO: 24176 - protein, 9 aa, Homo sapiens
  AACR GENIE Results; FAT1_p.A3261G; B4403
IEGNAEITY

SEQ ID NO: 24177 - protein, 9 aa, Homo sapiens
  AACR GENIE Results; FAT1_p.A3261G; B1801
IEGNAEITY

SEQ ID NO: 24178 - protein, 9 aa, Homo sapiens
  AACR GENIE Results; FAT1_p.A3261G; B1501
IEGNAEITY

SEQ ID NO: 24179 - protein, 9 aa, Homo sapiens
  AACR GENIE Results; FAT1_p.A3261G; B4001
IEGNAEITY

SEQ ID NO: 24180 - protein, 9 aa, Homo sapiens
  AACR GENIE Results; FAT1_p.H3814Y; A0101
VSDPWEEKY

SEQ ID NO: 24181 - protein, 9 aa, Homo sapiens
  AACR GENIE Results; FAT1_p.H3814Y; B5801
VSDPWEEKY

SEQ ID NO: 24182 - protein, 9 aa, Homo sapiens
  AACR GENIE Results; FAT1_p.V2603M; B1801
YEMNIGSSA

SEQ ID NO: 24183 - protein, 9 aa, Homo sapiens
  AACR GENIE Results; FBXW7_p.A503V; C1601
VAVVRCVQY

SEQ ID NO: 24184 - protein, 9 aa, Homo sapiens
  AACR GENIE Results; FBXW7_p.A503V; A0201
VLMGHVAVV

SEQ ID NO: 24185 - protein, 9 aa, Homo sapiens
  AACR GENIE Results; FBXW7_p.A503V; C1203
VAVVRCVQY

SEQ ID NO: 24186 - protein, 8 aa, Homo sapiens
  AACR GENIE Results; FBXW7_p.A503V; A0201
LMGHVAVV

SEQ ID NO: 24187 - protein, 9 aa, Homo sapiens
  AACR GENIE Results; FBXW7_p.A503V; B1302
VLMGHVAVV

SEQ ID NO: 24188 - protein, 9 aa, Homo sapiens
  AACR GENIE Results; FBXW7_p.A503V; B1501
VAVVRCVQY

SEQ ID NO: 24189 - protein, 11 aa, Homo sapiens
  AACR GENIE Results; FBXW7_p.G423V; B5701
RTLVGHTGVVW

SEQ ID NO: 24190 - protein, 10 aa, Homo sapiens
  AACR GENIE Results; FBXW7_p.R465C; B1502
TLYGHTSTVC

SEQ ID NO: 24191 - protein, 9 aa, Homo sapiens
  AACR GENIE Results; FBXW7_p.R465H; B3801
GHTSTVHCM

SEQ ID NO: 24192 - protein, 10 aa, Homo sapiens
  AACR GENIE Results; FBXW7_p.R479Q; B5701
GSQDATLRVW

SEQ ID NO: 24193 - protein, 10 aa, Homo sapiens
  AACR GENIE Results; FBXW7_p.R479Q; B5801
GSQDATLRVW

SEQ ID NO: 24194 - protein, 11 aa, Homo sapiens
  AACR GENIE Results; FBXW7_p.R479Q; A0206
RVVSGSQDATL

SEQ ID NO: 24195 - protein, 11 aa, Homo sapiens
  AACR GENIE Results; FBXW7_p.R479Q; A0205
RVVSGSQDATL

SEQ ID NO: 24196 - protein, 8 aa, Homo sapiens
  AACR GENIE Results; FBXW7_p.R479Q; B1302
SQDATLRV

SEQ ID NO: 24197 - protein, 11 aa, Homo sapiens
  AACR GENIE Results; FBXW7_p.R479Q; A6801
VVSGSQDATLR

SEQ ID NO: 24198 - protein, 11 aa, Homo sapiens
  AACR GENIE Results; FBXW7_p.R479Q; B5801
RVVSGSQDATL

SEQ ID NO: 24199 - protein, 10 aa, Homo sapiens
  AACR GENIE Results; FBXW7_p.R658Q; B4001
GEFIQNLVTL

SEQ ID NO: 24200 - protein, 8 aa, Homo sapiens
  AACR GENIE Results; FBXW7_p.R658Q; B4901
GEFIQNLV

SEQ ID NO: 24201 - protein, 10 aa, Homo sapiens
  AACR GENIE Results; FBXW7_p.R658Q; B4901
GEFIQNLVTL

SEQ ID NO: 24202 - protein, 9 aa, Homo sapiens
  AACR GENIE Results; FBXW7_p.R658Q; A2301
EFIQNLVTL

SEQ ID NO: 24203 - protein, 9 aa, Homo sapiens
  AACR GENIE Results; FBXW7_p.R658Q; A3303
EFIQNLVTL

SEQ ID NO: 24204 - protein, 9 aa, Homo sapiens
  AACR GENIE Results; FBXW7_p.R658Q; C1502
KTGEFIQNL

SEQ ID NO: 24205 - protein, 10 aa, Homo sapiens
  AACR GENIE Results; FBXW7_p.R689W; B2702
GSWNGTEETK

SEQ ID NO: 24206 - protein, 9 aa, Homo sapiens
  AACR GENIE Results; FBXW7_p.S582L; B3801
IHTLTGHQL

SEQ ID NO: 24207 - protein, 8 aa, Homo sapiens
  AACR GENIE Results; FBXW7_p.S582L; B1501
HQLLTSGM

SEQ ID NO: 24208 - protein, 9 aa, Homo sapiens
  AACR GENIE Results; FBXW7_p.S86L; B4403
EENNNRFIL

SEQ ID NO: 24209 - protein, 9 aa, Homo sapiens
  AACR GENIE Results; FGFR1_p.A121S; C0304
FSVNVSDSL

SEQ ID NO: 24210 - protein, 9 aa, Homo sapiens
  AACR GENIE Results; FGFR2_p.R450C; B0801
TPLVRITTC

SEQ ID NO: 24211 - protein, 9 aa, Homo sapiens
  AACR GENIE Results; FGFR2_p.T454M; A0201
SMADTPMLA

SEQ ID NO: 24212 - protein, 11 aa, Homo sapiens
  AACR GENIE Results; FGFR3_p.D462N; B4403
SELELPANPKW

SEQ ID NO: 24213 - protein, 9 aa, Homo sapiens
  AACR GENIE Results; FGFR3_p.D462N; B3503
LPANPKWEL

SEQ ID NO: 24214 - protein, 9 aa, Homo sapiens
  AACR GENIE Results; FGFR3_p.D462N; B0702
LPANPKWEL

SEQ ID NO: 24215 - protein, 11 aa, Homo sapiens
  AACR GENIE Results; FGFR3_p.D462N; B4402
SELELPANPKW

SEQ ID NO: 24216 - protein, 9 aa, Homo sapiens
  AACR GENIE Results; FGFR3_p.D462N; B3501
LPANPKWEL

SEQ ID NO: 24217 - protein, 9 aa, Homo sapiens
  AACR GENIE Results; FGFR3_p.D462N; B4403
LELPANPKW

SEQ ID NO: 24218 - protein, 9 aa, Homo sapiens
  AACR GENIE Results; FGFR3_p.D462N; B3502
LPANPKWEL

SEQ ID NO: 24219 - protein, 9 aa, Homo sapiens
  AACR GENIE Results; FGFR3_p.D462N; B5001
SELELPANP

SEQ ID NO: 24220 - protein, 9 aa, Homo sapiens
  AACR GENIE Results; FH_p.E488K; B4403
KETAIKLGY

SEQ ID NO: 24221 - protein, 9 aa, Homo sapiens
  AACR GENIE Results; FH_p.E488K; B4402
KETAIKLGY

SEQ ID NO: 24222 - protein, 9 aa, Homo sapiens
  AACR GENIE Results; FH_p.E488K; A1101
STLKETAIK

SEQ ID NO: 24223 - protein, 9 aa, Homo sapiens
  AACR GENIE Results; FH_p.E488K; A2301
KETAIKLGY

SEQ ID NO: 24224 - protein, 9 aa, Homo sapiens
  AACR GENIE Results; FH_p.E488K; A2601
ETAIKLGYL

SEQ ID NO: 24225 - protein, 8 aa, Homo sapiens
  AACR GENIE Results; FH_p.E488K; A2601
ETAIKLGY

SEQ ID NO: 24226 - protein, 9 aa, Homo sapiens
  AACR GENIE Results; FH_p.E488K; B0801
TLKETAIKL

SEQ ID NO: 24227 - protein, 9 aa, Homo sapiens
  AACR GENIE Results; FH_p.E488K; A0201
TLKETAIKL

SEQ ID NO: 24228 - protein, 9 aa, Homo sapiens
  AACR GENIE Results; FH_p.E488K; A0301
TLKETAIKL

SEQ ID NO: 24229 - protein, 10 aa, Homo sapiens
  AACR GENIE Results; FH_p.E488K; A1101
STLKETAIKL

SEQ ID NO: 24230 - protein, 10 aa, Homo sapiens
  AACR GENIE Results; FH_p.E488K; A0301
STLKETAIKL

SEQ ID NO: 24231 - protein, 9 aa, Homo sapiens
  AACR GENIE Results; FH_p.E488K; A0301
STLKETAIK

SEQ ID NO: 24232 - protein, 8 aa, Homo sapiens
  AACR GENIE Results; FLT1_p.D270N; B0801
YPNEKNKR

SEQ ID NO: 24233 - protein, 11 aa, Homo sapiens
  AACR GENIE Results; FLT1_p.R224Q; A2402
NYLTHQQTNTI

SEQ ID NO: 24234 - protein, 9 aa, Homo sapiens
  AACR GENIE Results; FLT1_p.R312C; A0301
CVRSGPSFK

SEQ ID NO: 24235 - protein, 8 aa, Homo sapiens
  AACR GENIE Results; FLT1_p.R501K; B5101
DSNMGNKI

SEQ ID NO: 24236 - protein, 9 aa, Homo sapiens
  AACR GENIE Results; FLT1_p.R501K; B3801
ADSNMGNKI

SEQ ID NO: 24237 - protein, 9 aa, Homo sapiens
  AACR GENIE Results; FLT4_p.C206Y; A2402
LYLQYETTW

SEQ ID NO: 24238 - protein, 10 aa, Homo sapiens
  AACR GENIE Results; FLT4_p.E100K; B1501
KVHANDTGSY

SEQ ID NO: 24239 - protein, 9 aa, Homo sapiens
  AACR GENIE Results; FLT4_p.P219H; C0802
DQDFLSNHF

SEQ ID NO: 24240 - protein, 8 aa, Homo sapiens
  AACR GENIE Results; FLT4_p.P219H; B4403
QDFLSNHF

SEQ ID NO: 24241 - protein, 10 aa, Homo sapiens
  AACR GENIE Results; FLT4_p.P363L; B5701
AAYPLPEFQW

SEQ ID NO: 24242 - protein, 9 aa, Homo sapiens
  AACR GENIE Results; FLT4_p.P363L; B3501
YPLPEFQWY

SEQ ID NO: 24243 - protein, 9 aa, Homo sapiens
  AACR GENIE Results; FLT4_p.P363L; C0303
LAAYPLPEF

SEQ ID NO: 24244 - protein, 9 aa, Homo sapiens
  AACR GENIE Results; FLT4_p.P363L; A2402
AYPLPEFQW

SEQ ID NO: 24245 - protein, 9 aa, Homo sapiens
  AACR GENIE Results; FLT4_p.P363L; C0304
LAAYPLPEF

SEQ ID NO: 24246 - protein, 9 aa, Homo sapiens
  AACR GENIE Results; FLT4_p.P363L; C1601
LAAYPLPEF

SEQ ID NO: 24247 - protein, 9 aa, Homo sapiens
  AACR GENIE Results; FLT4_p.P363L; B3501
LAAYPLPEF

SEQ ID NO: 24248 - protein, 9 aa, Homo sapiens
  AACR GENIE Results; FLT4_p.P363L; C0202
LAAYPLPEF

SEQ ID NO: 24249 - protein, 9 aa, Homo sapiens
  AACR GENIE Results; FLT4_p.P363L; A2301
AYPLPEFQW

SEQ ID NO: 24250 - protein, 9 aa, Homo sapiens
  AACR GENIE Results; FLT4_p.P364S; C0304
LAAYPPSEF

SEQ ID NO: 24251 - protein, 8 aa, Homo sapiens
  AACR GENIE Results; FLT4_p.P364S; C1203
AAYPPSEF

SEQ ID NO: 24252 - protein, 9 aa, Homo sapiens
  AACR GENIE Results; FLT4_p.P364S; C1203
LAAYPPSEF

SEQ ID NO: 24253 - protein, 9 aa, Homo sapiens
  AACR GENIE Results; FLT4_p.P364S; A2402
AYPPSEFQW

SEQ ID NO: 24254 - protein, 8 aa, Homo sapiens
  AACR GENIE Results; FLT4_p.P364S; C0304
AAYPPSEF

SEQ ID NO: 24255 - protein, 9 aa, Homo sapiens
  AACR GENIE Results; FLT4_p.P364S; B3501
YPPSEFQWY

SEQ ID NO: 24256 - protein, 10 aa, Homo sapiens
  AACR GENIE Results; FLT4_p.R1242T; A0201
VSFPGCLATG

SEQ ID NO: 24257 - protein, 8 aa, Homo sapiens
  AACR GENIE Results; GATA3_p.A109D; C0501
HTDSPWNL

SEQ ID NO: 24258 - protein, 8 aa, Homo sapiens
  AACR GENIE Results; GATA4_p.H436Q; B1501
SQGDIITA

SEQ ID NO: 24259 - protein, 8 aa, Homo sapiens
  AACR GENIE Results; GATA4_p.H436Q; A0201
SQGDIITA

SEQ ID NO: 24260 - protein, 9 aa, Homo sapiens
  AACR GENIE Results; GATA4_p.H436Q; B3501
DSQGDIITA

SEQ ID NO: 24261 - protein, 8 aa, Homo sapiens
  AACR GENIE Results; GLI1_p.A918T; B3501
TPAQEPSY

SEQ ID NO: 24262 - protein, 9 aa, Homo sapiens
  AACR GENIE Results; GLI1_p.D400Mfs*30; B0702
SPRGSGKEV

SEQ ID NO: 24263 - protein, 9 aa, Homo sapiens
  AACR GENIE Results; GLI1_p.R380Q; A0101
YTDPSSLQK

SEQ ID NO: 24264 - protein, 10 aa, Homo sapiens
  AACR GENIE Results; GLI1_p.R380Q; A0101
YTDPSSLQKH

SEQ ID NO: 24265 - protein, 9 aa, Homo sapiens
  AACR GENIE Results; GLI1_p.R380Q; A1101
YTDPSSLQK

SEQ ID NO: 24266 - protein, 9 aa, Homo sapiens
  AACR GENIE Results; GLI1_p.R380Q; B5101
DPSSLQKHV

SEQ ID NO: 24267 - protein, 9 aa, Homo sapiens
  AACR GENIE Results; GLI1_p.R380Q; A0301
YTDPSSLQK

SEQ ID NO: 24268 - protein, 11 aa, Homo sapiens
  AACR GENIE Results; GLI1_p.R380Q; B2705
KRYTDPSSLQK

SEQ ID NO: 24269 - protein, 9 aa, Homo sapiens
  AACR GENIE Results; GLI1_p.R380Q; A0201
SLQKHVKTV

SEQ ID NO: 24270 - protein, 9 aa, Homo sapiens
  AACR GENIE Results; GLI3_p.A353T; A2402
TYSSTPVSL

SEQ ID NO: 24271 - protein, 8 aa, Homo sapiens
  AACR GENIE Results; GLI3_p.A353T; C0304
YSSTPVSL

SEQ ID NO: 24272 - protein, 8 aa, Homo sapiens
  AACR GENIE Results; GLI3_p.A353T; C0303
YSSTPVSL

SEQ ID NO: 24273 - protein, 10 aa, Homo sapiens
  AACR GENIE Results; GLI3_p.A353T; C0304
FTYSSTPVSL

SEQ ID NO: 24274 - protein, 10 aa, Homo sapiens
  AACR GENIE Results; GLI3_p.A353T; C0303
FTYSSTPVSL

SEQ ID NO: 24275 - protein, 8 aa, Homo sapiens
  AACR GENIE Results; GLI3_p.A353T; C1601
YSSTPVSL

SEQ ID NO: 24276 - protein, 11 aa, Homo sapiens
  AACR GENIE Results; GLI3_p.A353T; A2402
TYSSTPVSLHM

SEQ ID NO: 24277 - protein, 8 aa, Homo sapiens
  AACR GENIE Results; GLI3_p.A353T; C1203
YSSTPVSL

SEQ ID NO: 24278 - protein, 9 aa, Homo sapiens
  AACR GENIE Results; GLI3_p.A353T; C0702
TYSSTPVSL

SEQ ID NO: 24279 - protein, 9 aa, Homo sapiens
  AACR GENIE Results; GLI3_p.A353T; C1601
SSTPVSLHM

SEQ ID NO: 24280 - protein, 11 aa, Homo sapiens
  AACR GENIE Results; GLI3_p.M274V; A2402
EYLHAVDSTRF

SEQ ID NO: 24281 - protein, 8 aa, Homo sapiens
  AACR GENIE Results; GNAS_p.Q227L; C0401
MFDVGGLR

SEQ ID NO: 24282 - protein, 9 aa, Homo sapiens
  AACR GENIE Results; GNAS_p.Q227L; B3801
FHMFDVGGL

SEQ ID NO: 24283 - protein, 11 aa, Homo sapiens
  AACR GENIE Results; GNAS_p.R201C; A1101
CVLTSGIFETK

SEQ ID NO: 24284 - protein, 11 aa, Homo sapiens
  AACR GENIE Results; GNAS_p.R201C; A0301
CVLTSGIFETK

SEQ ID NO: 24285 - protein, 11 aa, Homo sapiens
  AACR GENIE Results; GNAS_p.R201C; B2702
CVLTSGIFETK

SEQ ID NO: 24286 - protein, 11 aa, Homo sapiens
  AACR GENIE Results; GNAS_p.R201H; B2702
HVLTSGIFETK

SEQ ID NO: 24287 - protein, 11 aa, Homo sapiens
  AACR GENIE Results; GNAS_p.R201H; A0301
HVLTSGIFETK

SEQ ID NO: 24288 - protein, 11 aa, Homo sapiens
  AACR GENIE Results; GNAS_p.R201H; A1101
HVLTSGIFETK

SEQ ID NO: 24289 - protein, 9 aa, Homo sapiens
  AACR GENIE Results; GNAS_p.R201H; B3701
QDLLRCHVL

SEQ ID NO: 24290 - protein, 11 aa, Homo sapiens
  AACR GENIE Results; GNAS_p.R201H; A6802
HVLTSGIFETK

SEQ ID NO: 24291 - protein, 8 aa, Homo sapiens
  AACR GENIE Results; GNAS_p.R201H; B1502
HVLTSGIF

SEQ ID NO: 24292 - protein, 11 aa, Homo sapiens
  AACR GENIE Results; GNAS_p.R201L; A0301
LVLTSGIFETK

SEQ ID NO: 24293 - protein, 11 aa, Homo sapiens
  AACR GENIE Results; GNAS_p.R201L; A1101
LVLTSGIFETK

SEQ ID NO: 24294 - protein, 9 aa, Homo sapiens
  AACR GENIE Results; H3F3A_p.R50H; B5701
VALHEIRRY

SEQ ID NO: 24295 - protein, 9 aa, Homo sapiens
  AACR GENIE Results; H3F3A_p.R50H; A6801
GTVALHEIR

SEQ ID NO: 24296 - protein, 9 aa, Homo sapiens
  AACR GENIE Results; H3F3A_p.R50H; A6801
TVALHEIRR

SEQ ID NO: 24297 - protein, 9 aa, Homo sapiens
  AACR GENIE Results; H3F3A_p.R50H; C1601
VALHEIRRY

SEQ ID NO: 24298 - protein, 9 aa, Homo sapiens
  AACR GENIE Results; H3F3A_p.R50H; B5701
GTVALHEIR

SEQ ID NO: 24299 - protein, 8 aa, Homo sapiens
  AACR GENIE Results; H3F3A_p.R50H; A0201
GTVALHEI

SEQ ID NO: 24300 - protein, 11 aa, Homo sapiens
  AACR GENIE Results; H3F3A_p.R50H; C0602
YRPGTVALHEI

SEQ ID NO: 24301 - protein, 9 aa, Homo sapiens
  AACR GENIE Results; H3F3A_p.R50H; C1203
VALHEIRRY

SEQ ID NO: 24302 - protein, 10 aa, Homo sapiens
  AACR GENIE Results; H3F3A_p.R50H; A6801
GTVALHEIRR

SEQ ID NO: 24303 - protein, 11 aa, Homo sapiens
  AACR GENIE Results; H3F3A_p.R50H; B5701
GTVALHEIRRY

SEQ ID NO: 24304 - protein, 10 aa, Homo sapiens
  AACR GENIE Results; H3F3A_p.R50H; B0702
RPGTVALHEI

SEQ ID NO: 24305 - protein, 8 aa, Homo sapiens
  AACR GENIE Results; H3F3A_p.R50H; A0301
ALHEIRRY

SEQ ID NO: 24306 - protein, 8 aa, Homo sapiens
  AACR GENIE Results; H3F3A_p.R50H; B5701
GTVALHEI

SEQ ID NO: 24307 - protein, 9 aa, Homo sapiens
  AACR GENIE Results; H3F3A_p.R50H; A1101
GTVALHEIR

SEQ ID NO: 24308 - protein, 8 aa, Homo sapiens
  AACR GENIE Results; H3F3A_p.R50H; A1101
RPGTVALH

SEQ ID NO: 24309 - protein, 10 aa, Homo sapiens
  AACR GENIE Results; HGF_p.T316N; B5101
EGYRGNVNTI

SEQ ID NO: 24310 - protein, 9 aa, Homo sapiens
  AACR GENIE Results; HIST1H3B_p.E106Q; C0802
FQDTNLCAI

SEQ ID NO: 24311 - protein, 9 aa, Homo sapiens
  AACR GENIE Results; HIST1H3B_p.E106Q; A0201
FQDTNLCAI

SEQ ID NO: 24312 - protein, 9 aa, Homo sapiens
  AACR GENIE Results; HIST1H3B_p.E106Q; C0501
FQDTNLCAI

SEQ ID NO: 24313 - protein, 11 aa, Homo sapiens
  AACR GENIE Results; HIST1H3B_p.E106Q; A0201
GLFQDTNLCAI

SEQ ID NO: 24314 - protein, 9 aa, Homo sapiens
  AACR GENIE Results; HIST1H3B_p.E106Q; B4001
FQDTNLCAI

SEQ ID NO: 24315 - protein, 10 aa, Homo sapiens
  AACR GENIE Results; HIST1H3B_p.E106Q; A3101
AYLVGLFQDT

SEQ ID NO: 24316 - protein, 9 aa, Homo sapiens
  AACR GENIE Results; HIST1H3B_p.E106Q; A0201
GLFQDTNLC

SEQ ID NO: 24317 - protein, 9 aa, Homo sapiens
  AACR GENIE Results; HIST1H3B_p.E106Q; A0201
YLVGLFQDT

SEQ ID NO: 24318 - protein, 10 aa, Homo sapiens
  AACR GENIE Results; HRAS_p.G13V; A1101
VVVGAGVVGK

SEQ ID NO: 24319 - protein, 9 aa, Homo sapiens
  AACR GENIE Results; HRAS_p.G13V; A1101
VVGAGVVGK

SEQ ID NO: 24320 - protein, 10 aa, Homo sapiens
  AACR GENIE Results; HRAS_p.G13V; A0301
VVVGAGVVGK

SEQ ID NO: 24321 - protein, 9 aa, Homo sapiens
  AACR GENIE Results; HRAS_p.G13V; A0301
VVGAGVVGK

SEQ ID NO: 24322 - protein, 11 aa, Homo sapiens
  AACR GENIE Results; HRAS_p.G13V; A1101
LVVVGAGVVGK

SEQ ID NO: 24323 - protein, 9 aa, Homo sapiens
  AACR GENIE Results; HRAS_p.G13V; B0801
AGVVGKSAL

SEQ ID NO: 24324 - protein, 9 aa, Homo sapiens
  AACR GENIE Results; HRAS_p.G13V; B0702
AGVVGKSAL

SEQ ID NO: 24325 - protein, 9 aa, Homo sapiens
  AACR GENIE Results; HRAS_p.G13V; A0201
KLVVVGAGV

SEQ ID NO: 24326 - protein, 11 aa, Homo sapiens
  AACR GENIE Results; HRAS_p.G13V; A0301
LVVVGAGVVGK

SEQ ID NO: 24327 - protein, 11 aa, Homo sapiens
  AACR GENIE Results; HRAS_p.G13V; B0801
VGAGVVGKSAL

SEQ ID NO: 24328 - protein, 8 aa, Homo sapiens
  AACR GENIE Results; HRAS_p.G13V; A1101
VGAGVVGK

SEQ ID NO: 24329 - protein, 9 aa, Homo sapiens
  AACR GENIE Results; HRAS_p.G13V; B1501
AGVVGKSAL

SEQ ID NO: 24330 - protein, 8 aa, Homo sapiens
  AACR GENIE Results; HRAS_p.G13V; B0801
GVVGKSAL

SEQ ID NO: 24331 - protein, 10 aa, Homo sapiens
  AACR GENIE Results; ID3_p.E12K; A0301
ALSPVRGCYK

SEQ ID NO: 24332 - protein, 10 aa, Homo sapiens
  AACR GENIE Results; ID3_p.E12K; A1101
ALSPVRGCYK

SEQ ID NO: 24333 - protein, 9 aa, Homo sapiens
  AACR GENIE Results; IDH1_p.R132L; B1501
GLHAYGDQY

SEQ ID NO: 24334 - protein, 9 aa, Homo sapiens
  AACR GENIE Results; IDH1_p.R132L; A2902
GLHAYGDQY

SEQ ID NO: 24335 - protein, 10 aa, Homo sapiens
  AACR GENIE Results; IDH2_p.R140Q; B1501
IQNILGGTVF

SEQ ID NO: 24336 - protein, 10 aa, Homo sapiens
  AACR GENIE Results; IDH2_p.R140Q; B0702
SPNGTIQNIL

SEQ ID NO: 24337 - protein, 10 aa, Homo sapiens
  AACR GENIE Results; IGF1R_p.N202S; A6801
TTINNEYSYR

SEQ ID NO: 24338 - protein, 9 aa, Homo sapiens
  AACR GENIE Results; IGF1R_p.N202S; A3002
TTINNEYSY

SEQ ID NO: 24339 - protein, 9 aa, Homo sapiens
  AACR GENIE Results; IGF1R_p.N202S; A2902
TTINNEYSY

SEQ ID NO: 24340 - protein, 10 aa, Homo sapiens
  AACR GENIE Results; IGF1R_p.N202S; A3303
TTINNEYSYR

SEQ ID NO: 24341 - protein, 9 aa, Homo sapiens
  AACR GENIE Results; IGF1R_p.N202S; B1501
TTINNEYSY

SEQ ID NO: 24342 - protein, 10 aa, Homo sapiens
  AACR GENIE Results; IGF1R_p.N202S; B5801
KTTINNEYSY

SEQ ID NO: 24343 - protein, 9 aa, Homo sapiens
  AACR GENIE Results; IGF1R_p.N202S; B5801
TTINNEYSY

SEQ ID NO: 24344 - protein, 10 aa, Homo sapiens
  AACR GENIE Results; IGF1R_p.N202S; A3002
KTTINNEYSY

SEQ ID NO: 24345 - protein, 9 aa, Homo sapiens
  AACR GENIE Results; IGF1R_p.N202S; B3501
TTINNEYSY

SEQ ID NO: 24346 - protein, 8 aa, Homo sapiens
  AACR GENIE Results; IGF1R_p.N202S; A3303
INNEYSYR

SEQ ID NO: 24347 - protein, 9 aa, Homo sapiens
  AACR GENIE Results; IGF1R_p.N202S; A2601
TTINNEYSY

SEQ ID NO: 24348 - protein, 10 aa, Homo sapiens
  AACR GENIE Results; IGF1R_p.N202S; A6802
TTINNEYSYR

SEQ ID NO: 24349 - protein, 9 aa, Homo sapiens
  AACR GENIE Results; IGF1R_p.N202S; A3303
TINNEYSYR

SEQ ID NO: 24350 - protein, 9 aa, Homo sapiens
  AACR GENIE Results; IGF1R_p.T1366P; B3503
LPLPQSSPC

SEQ ID NO: 24351 - protein, 10 aa, Homo sapiens
  AACR GENIE Results; IKZF1_p.A369T; B3801
AQDSTVENLL

SEQ ID NO: 24352 - protein, 9 aa, Homo sapiens
  AACR GENIE Results; IKZF1_p.A369T; B3801
AQDSTVENL

SEQ ID NO: 24353 - protein, 11 aa, Homo sapiens
  AACR GENIE Results; IKZF1_p.A369T; A1101
STVENLLLLSK

SEQ ID NO: 24354 - protein, 9 aa, Homo sapiens
  AACR GENIE Results; IKZF1_p.A369T; C0802
AQDSTVENL

SEQ ID NO: 24355 - protein, 9 aa, Homo sapiens
  AACR GENIE Results; IKZF1_p.A369T; B3901
NHSAQDSTV

SEQ ID NO: 24356 - protein, 8 aa, Homo sapiens
  AACR GENIE Results; IKZF1_p.A369T; B3701
QDSTVENL

SEQ ID NO: 24357 - protein, 9 aa, Homo sapiens
  AACR GENIE Results; IKZF1_p.A369T; B3801
NHSAQDSTV

SEQ ID NO: 24358 - protein, 10 aa, Homo sapiens
  AACR GENIE Results; IKZF1_p.A369T; B2702
TVENLLLLSK

SEQ ID NO: 24359 - protein, 11 aa, Homo sapiens
  AACR GENIE Results; IKZF1_p.A369T; B3801
AQDSTVENLLL

SEQ ID NO: 24360 - protein, 11 aa, Homo sapiens
  AACR GENIE Results; IKZF1_p.A369T; B1302
AQDSTVENLLL

SEQ ID NO: 24361 - protein, 9 aa, Homo sapiens
  AACR GENIE Results; IKZF1_p.A369T; C0501
AQDSTVENL

SEQ ID NO: 24362 - protein, 9 aa, Homo sapiens
  AACR GENIE Results; IKZF1_p.A369T; B3801
QDSTVENLL

SEQ ID NO: 24363 - protein, 9 aa, Homo sapiens
  AACR GENIE Results; IKZF1_p.A369T; A0205
AQDSTVENL

SEQ ID NO: 24364 - protein, 9 aa, Homo sapiens
  AACR GENIE Results; IKZF1_p.A369T; B3901
AQDSTVENL

SEQ ID NO: 24365 - protein, 9 aa, Homo sapiens
  AACR GENIE Results; IKZF1_p.A369T; C1502
STVENLLLL

SEQ ID NO: 24366 - protein, 9 aa, Homo sapiens
  AACR GENIE Results; IKZF1_p.A369T; B1302
AQDSTVENL

SEQ ID NO: 24367 - protein, 9 aa, Homo sapiens
  AACR GENIE Results; IKZF1_p.A369T; A6802
STVENLLLL

SEQ ID NO: 24368 - protein, 10 aa, Homo sapiens
  AACR GENIE Results; IKZF1_p.A369T; A1101
TVENLLLLSK

SEQ ID NO: 24369 - protein, 9 aa, Homo sapiens
  AACR GENIE Results; IKZF1_p.A369T; A0205
STVENLLLL

SEQ ID NO: 24370 - protein, 11 aa, Homo sapiens
  AACR GENIE Results; IKZF1_p.A369T; A6801
STVENLLLLSK

SEQ ID NO: 24371 - protein, 11 aa, Homo sapiens
  AACR GENIE Results; IKZF1_p.A369T; B2702
STVENLLLLSK

SEQ ID NO: 24372 - protein, 10 aa, Homo sapiens
  AACR GENIE Results; IKZF1_p.A369T; C0802
AQDSTVENLL

SEQ ID NO: 24373 - protein, 9 aa, Homo sapiens
  AACR GENIE Results; IKZF1_p.A369T; B4002
QDSTVENLL

SEQ ID NO: 24374 - protein, 11 aa, Homo sapiens
  AACR GENIE Results; IKZF1_p.V370M; A1101
SAMENLLLLSK

SEQ ID NO: 24375 - protein, 9 aa, Homo sapiens
  AACR GENIE Results; IKZF1_p.V370M; C0802
AQDSAMENL

SEQ ID NO: 24376 - protein, 9 aa, Homo sapiens
  AACR GENIE Results; IKZF1_p.V370M; B3801
NHSAQDSAM

SEQ ID NO: 24377 - protein, 10 aa, Homo sapiens
  AACR GENIE Results; IKZF1_p.V370M; B3801
AQDSAMENLL

SEQ ID NO: 24378 - protein, 9 aa, Homo sapiens
  AACR GENIE Results; IKZF1_p.V370M; B3801
AQDSAMENL

SEQ ID NO: 24379 - protein, 9 aa, Homo sapiens
  AACR GENIE Results; IKZF1_p.V370M; C0304
SAMENLLLL

SEQ ID NO: 24380 - protein, 9 aa, Homo sapiens
  AACR GENIE Results; IKZF1_p.V370M; C1502
SAMENLLLL

SEQ ID NO: 24381 - protein, 9 aa, Homo sapiens
  AACR GENIE Results; IKZF1_p.V370M; C0303
SAMENLLLL

SEQ ID NO: 24382 - protein, 9 aa, Homo sapiens
  AACR GENIE Results; IKZF1_p.V370M; A1101
SAMENLLLL

SEQ ID NO: 24383 - protein, 9 aa, Homo sapiens
  AACR GENIE Results; IKZF1_p.V370M; B3801
QDSAMENLL

SEQ ID NO: 24384 - protein, 9 aa, Homo sapiens
  AACR GENIE Results; IKZF1_p.V370M; C0501
AQDSAMENL

SEQ ID NO: 24385 - protein, 10 aa, Homo sapiens
  AACR GENIE Results; IKZF1_p.V370M; C0802
AQDSAMENLL

SEQ ID NO: 24386 - protein, 9 aa, Homo sapiens
  AACR GENIE Results; JAK2_p.R1063C; B3501
SPPAEFMCM

SEQ ID NO: 24387 - protein, 9 aa, Homo sapiens
  AACR GENIE Results; JAK3_p.L368V; B4001
KEVAPPRVL

SEQ ID NO: 24388 - protein, 9 aa, Homo sapiens
  AACR GENIE Results; JAK3_p.L368V; B4403
KEVAPPRVL

SEQ ID NO: 24389 - protein, 9 aa, Homo sapiens
  AACR GENIE Results; JAK3_p.L368V; B0702
KEVAPPRVL

SEQ ID NO: 24390 - protein, 9 aa, Homo sapiens
  AACR GENIE Results; JAK3_p.L368V; B4402
KEVAPPRVL

SEQ ID NO: 24391 - protein, 8 aa, Homo sapiens
  AACR GENIE Results; JAK3_p.L454P; B4403
RELPATCW

SEQ ID NO: 24392 - protein, 11 aa, Homo sapiens
  AACR GENIE Results; JAK3_p.L454P; B5701
SSLRELPATCW

SEQ ID NO: 24393 - protein, 9 aa, Homo sapiens
  AACR GENIE Results; JAK3_p.L454P; A3001
SLRELPATC

SEQ ID NO: 24394 - protein, 9 aa, Homo sapiens
  AACR GENIE Results; JAK3_p.L454P; A0201
SLRELPATC

SEQ ID NO: 24395 - protein, 8 aa, Homo sapiens
  AACR GENIE Results; JAK3_p.L454P; A2301
RELPATCW

SEQ ID NO: 24396 - protein, 8 aa, Homo sapiens
  AACR GENIE Results; JAK3_p.L454P; B4402
RELPATCW

SEQ ID NO: 24397 - protein, 9 aa, Homo sapiens
  AACR GENIE Results; KDM6A_p.S820A; B5101
VASSPASAI

SEQ ID NO: 24398 - protein, 9 aa, Homo sapiens
  AACR GENIE Results; KDR_p.A10T; B5701
KVLLAVTLW

SEQ ID NO: 24399 - protein, 9 aa, Homo sapiens
  AACR GENIE Results; KDR_p.E980G; A1101
ASSGFVEGK

SEQ ID NO: 24400 - protein, 11 aa, Homo sapiens
  AACR GENIE Results; KDR_p.E980G; A1101
SSASSGFVEGK

SEQ ID NO: 24401 - protein, 10 aa, Homo sapiens
  AACR GENIE Results; KDR_p.E980G; A1101
SASSGFVEGK

SEQ ID NO: 24402 - protein, 9 aa, Homo sapiens
  AACR GENIE Results; KDR_p.E980G; A0301
ASSGFVEGK

SEQ ID NO: 24403 - protein, 9 aa, Homo sapiens
  AACR GENIE Results; KDR_p.I256T; B4403
TELNVGTDF

SEQ ID NO: 24404 - protein, 9 aa, Homo sapiens
  AACR GENIE Results; KDR_p.I256T; B1801
TELNVGTDF

SEQ ID NO: 24405 - protein, 11 aa, Homo sapiens
  AACR GENIE Results; KDR_p.I256T; B4403
TELNVGTDFNW

SEQ ID NO: 24406 - protein, 9 aa, Homo sapiens
  AACR GENIE Results; KDR_p.I256T; B4001
TELNVGTDF

SEQ ID NO: 24407 - protein, 9 aa, Homo sapiens
  AACR GENIE Results; KDR_p.I256T; B4402
TELNVGTDF

SEQ ID NO: 24408 - protein, 9 aa, Homo sapiens
  AACR GENIE Results; KDR_p.I256T; B1501
TELNVGTDF

SEQ ID NO: 24409 - protein, 8 aa, Homo sapiens
  AACR GENIE Results; KDR_p.I256T; A0101
GTDFNWEY

SEQ ID NO: 24410 - protein, 11 aa, Homo sapiens
  AACR GENIE Results; KDR_p.I256T; B4402
TELNVGTDFNW

SEQ ID NO: 24411 - protein, 9 aa, Homo sapiens
  AACR GENIE Results; KDR_p.R347H; B4901
VEATVGEHV

SEQ ID NO: 24412 - protein, 9 aa, Homo sapiens
  AACR GENIE Results; KDR_p.R347H; B4001
VEATVGEHV

SEQ ID NO: 24413 - protein, 9 aa, Homo sapiens
  AACR GENIE Results; KDR_p.R347H; B1302
VEATVGEHV

SEQ ID NO: 24414 - protein, 9 aa, Homo sapiens
  AACR GENIE Results; KDR_p.R347H; A3001
VEATVGEHV

SEQ ID NO: 24415 - protein, 9 aa, Homo sapiens
  AACR GENIE Results; KDR_p.R347H; B4403
VEATVGEHV

SEQ ID NO: 24416 - protein, 9 aa, Homo sapiens
  AACR GENIE Results; KDR_p.R347H; A6801
EATVGEHVR

SEQ ID NO: 24417 - protein, 11 aa, Homo sapiens
  AACR GENIE Results; KDR_p.R347H; A0201
SLVEATVGEHV

SEQ ID NO: 24418 - protein, 11 aa, Homo sapiens
  AACR GENIE Results; KDR_p.R347H; B1302
SLVEATVGEHV

SEQ ID NO: 24419 - protein, 8 aa, Homo sapiens
  AACR GENIE Results; KDR_p.R347H; B1801
VEATVGEH

SEQ ID NO: 24420 - protein, 9 aa, Homo sapiens
  AACR GENIE Results; KDR_p.R549K; A1101
RVISFHVTK

SEQ ID NO: 24421 - protein, 9 aa, Homo sapiens
  AACR GENIE Results; KDR_p.R549K; A0301
RVISFHVTK

SEQ ID NO: 24422 - protein, 9 aa, Homo sapiens
  AACR GENIE Results; KDR_p.R549K; C0304
VTKGPEITL

SEQ ID NO: 24423 - protein, 9 aa, Homo sapiens
  AACR GENIE Results; KDR_p.R549K; C1203
VTKGPEITL

SEQ ID NO: 24424 - protein, 9 aa, Homo sapiens
  AACR GENIE Results; KDR_p.R549K; B1501
VTKGPEITL

SEQ ID NO: 24425 - protein, 9 aa, Homo sapiens
  AACR GENIE Results; KDR_p.R549K; C0202
VTKGPEITL

SEQ ID NO: 24426 - protein, 9 aa, Homo sapiens
  AACR GENIE Results; KDR_p.R549K; C0303
VTKGPEITL

SEQ ID NO: 24427 - protein, 9 aa, Homo sapiens
  AACR GENIE Results; KDR_p.R961W; B5701
GAIPVDLKW

SEQ ID NO: 24428 - protein, 10 aa, Homo sapiens
  AACR GENIE Results; KDR_p.R961W; B5701
VGAIPVDLKW

SEQ ID NO: 24429 - protein, 9 aa, Homo sapiens
  AACR GENIE Results; KDR_p.T1258M; B1501
NQMDSGMVL

SEQ ID NO: 24430 - protein, 9 aa, Homo sapiens
  AACR GENIE Results; KDR_p.T1258M; B1501
KVIPDDNQM

SEQ ID NO: 24431 - protein, 9 aa, Homo sapiens
  AACR GENIE Results; KDR_p.T875A; C0304
AAHSEHRAL

SEQ ID NO: 24432 - protein, 9 aa, Homo sapiens
  AACR GENIE Results; KDR_p.T875A; C1601
AAHSEHRAL

SEQ ID NO: 24433 - protein, 8 aa, Homo sapiens
  AACR GENIE Results; KDR_p.V218I; B1501
YIVVIVGY

SEQ ID NO: 24434 - protein, 10 aa, Homo sapiens
  AACR GENIE Results; KEAP1_p.C171F; B1501
YQIDSVVRAF

SEQ ID NO: 24435 - protein, 9 aa, Homo sapiens
  AACR GENIE Results; KEAP1_p.C171F; C0802
FSDFLVQQL

SEQ ID NO: 24436 - protein, 9 aa, Homo sapiens
  AACR GENIE Results; KEAP1_p.C171F; C0501
FSDFLVQQL

SEQ ID NO: 24437 - protein, 9 aa, Homo sapiens
  AACR GENIE Results; KEAP1_p.C171F; B3501
QIDSVVRAF

SEQ ID NO: 24438 - protein, 10 aa, Homo sapiens
  AACR GENIE Results; KEAP1_p.C171F; A2601
YQIDSVVRAF

SEQ ID NO: 24439 - protein, 9 aa, Homo sapiens
  AACR GENIE Results; KEAP1_p.C171F; C0802
QIDSVVRAF

SEQ ID NO: 24440 - protein, 9 aa, Homo sapiens
  AACR GENIE Results; KEAP1_p.C171F; B1501
QIDSVVRAF

SEQ ID NO: 24441 - protein, 9 aa, Homo sapiens
  AACR GENIE Results; KEAP1_p.C171F; A0101
QIDSVVRAF

SEQ ID NO: 24442 - protein, 9 aa, Homo sapiens
  AACR GENIE Results; KEAP1_p.C171F; B3801
QIDSVVRAF

SEQ ID NO: 24443 - protein, 11 aa, Homo sapiens
  AACR GENIE Results; KEAP1_p.C171F; A2402
MYQIDSVVRAF

SEQ ID NO: 24444 - protein, 9 aa, Homo sapiens
  AACR GENIE Results; KEAP1_p.C171F; B4403
QIDSVVRAF

SEQ ID NO: 24445 - protein, 9 aa, Homo sapiens
  AACR GENIE Results; KEAP1_p.C171F; C0501
QIDSVVRAF

SEQ ID NO: 24446 - protein, 10 aa, Homo sapiens
  AACR GENIE Results; KEAP1_p.C171F; C0202
YQIDSVVRAF

SEQ ID NO: 24447 - protein, 9 aa, Homo sapiens
  AACR GENIE Results; KEAP1_p.C171F; B4402
QIDSVVRAF

SEQ ID NO: 24448 - protein, 9 aa, Homo sapiens
  AACR GENIE Results; KEAP1_p.C171F; B5701
QIDSVVRAF

SEQ ID NO: 24449 - protein, 8 aa, Homo sapiens
  AACR GENIE Results; KEAP1_p.C171F; B1801
IDSVVRAF

SEQ ID NO: 24450 - protein, 10 aa, Homo sapiens
  AACR GENIE Results; KEAP1_p.C171F; A2301
YQIDSVVRAF

SEQ ID NO: 24451 - protein, 9 aa, Homo sapiens
  AACR GENIE Results; KEAP1_p.C171F; B0702
QIDSVVRAF

SEQ ID NO: 24452 - protein, 9 aa, Homo sapiens
  AACR GENIE Results; KEAP1_p.C171F; C0401
QIDSVVRAF

SEQ ID NO: 24453 - protein, 9 aa, Homo sapiens
  AACR GENIE Results; KEAP1_p.C171F; A0101
FSDFLVQQL

SEQ ID NO: 24454 - protein, 9 aa, Homo sapiens
  AACR GENIE Results; KEAP1_p.C171F; A0301
QIDSVVRAF

SEQ ID NO: 24455 - protein, 11 aa, Homo sapiens
  AACR GENIE Results; KEAP1_p.C171F; A2301
MYQIDSVVRAF

SEQ ID NO: 24456 - protein, 10 aa, Homo sapiens
  AACR GENIE Results; KEAP1_p.C171F; B1302
YQIDSVVRAF

SEQ ID NO: 24457 - protein, 9 aa, Homo sapiens
  AACR GENIE Results; KEAP1_p.C171F; C0304
FSDFLVQQL

SEQ ID NO: 24458 - protein, 10 aa, Homo sapiens
  AACR GENIE Results; KEAP1_p.C171F; B3801
YQIDSVVRAF

SEQ ID NO: 24459 - protein, 10 aa, Homo sapiens
  AACR GENIE Results; KEAP1_p.C171F; B4403
YQIDSVVRAF

SEQ ID NO: 24460 - protein, 10 aa, Homo sapiens
  AACR GENIE Results; KEAP1_p.C171F; A3201
YQIDSVVRAF

SEQ ID NO: 24461 - protein, 9 aa, Homo sapiens
  AACR GENIE Results; KEAP1_p.C171F; B3801
FSDFLVQQL

SEQ ID NO: 24462 - protein, 9 aa, Homo sapiens
  AACR GENIE Results; KEAP1_p.C171F; C1502
FSDFLVQQL

SEQ ID NO: 24463 - protein, 9 aa, Homo sapiens
  AACR GENIE Results; KEAP1_p.C171F; C0401
FSDFLVQQL

SEQ ID NO: 24464 - protein, 10 aa, Homo sapiens
  AACR GENIE Results; KEAP1_p.C171F; B4402
YQIDSVVRAF

SEQ ID NO: 24465 - protein, 10 aa, Homo sapiens
  AACR GENIE Results; KEAP1_p.C171F; C0303
YQIDSVVRAF

SEQ ID NO: 24466 - protein, 9 aa, Homo sapiens
  AACR GENIE Results; KEAP1_p.C171F; A1101
QIDSVVRAF

SEQ ID NO: 24467 - protein, 10 aa, Homo sapiens
  AACR GENIE Results; KEAP1_p.C171F; B5701
YQIDSVVRAF

SEQ ID NO: 24468 - protein, 9 aa, Homo sapiens
  AACR GENIE Results; KEAP1_p.C171F; B4001
FSDFLVQQL

SEQ ID NO: 24469 - protein, 10 aa, Homo sapiens
  AACR GENIE Results; KEAP1_p.C171F; C0304
YQIDSVVRAF

SEQ ID NO: 24470 - protein, 9 aa, Homo sapiens
  AACR GENIE Results; KEAP1_p.C171F; A3201
QIDSVVRAF

SEQ ID NO: 24471 - protein, 10 aa, Homo sapiens
  AACR GENIE Results; KEAP1_p.C171F; B3501
YQIDSVVRAF

SEQ ID NO: 24472 - protein, 10 aa, Homo sapiens
  AACR GENIE Results; KEAP1_p.C297F; B4403
CEILQSDSRF

SEQ ID NO: 24473 - protein, 9 aa, Homo sapiens
  AACR GENIE Results; KEAP1_p.C297F; A0101
QSDSRFKDY

SEQ ID NO: 24474 - protein, 9 aa, Homo sapiens
  AACR GENIE Results; KEAP1_p.C297F; A2601
EILQSDSRF

SEQ ID NO: 24475 - protein, 9 aa, Homo sapiens
  AACR GENIE Results; KEAP1_p.C297F; A0301
ILQSDSRFK

SEQ ID NO: 24476 - protein, 9 aa, Homo sapiens
  AACR GENIE Results; KEAP1_p.D236Y; C1601
LVTLISRDY

SEQ ID NO: 24477 - protein, 10 aa, Homo sapiens
  AACR GENIE Results; KEAP1_p.D479Y; A1101
AVGGFYGTNR

SEQ ID NO: 24478 - protein, 9 aa, Homo sapiens
  AACR GENIE Results; KEAP1_p.D479Y; B0801
YGTNRLNSA

SEQ ID NO: 24479 - protein, 9 aa, Homo sapiens
  AACR GENIE Results; KEAP1_p.D479Y; A0301
LLYAVGGFY

SEQ ID NO: 24480 - protein, 10 aa, Homo sapiens
  AACR GENIE Results; KEAP1_p.D479Y; A0301
AVGGFYGTNR

SEQ ID NO: 24481 - protein, 10 aa, Homo sapiens
  AACR GENIE Results; KEAP1_p.D479Y; A0201
LLYAVGGFYG

SEQ ID NO: 24482 - protein, 9 aa, Homo sapiens
  AACR GENIE Results; KEAP1_p.D479Y; A0101
LLYAVGGFY

SEQ ID NO: 24483 - protein, 9 aa, Homo sapiens
  AACR GENIE Results; KEAP1_p.E192K; A1101
AIGIANFAK

SEQ ID NO: 24484 - protein, 10 aa, Homo sapiens
  AACR GENIE Results; KEAP1_p.E192K; A6801
NAIGIANFAK

SEQ ID NO: 24485 - protein, 9 aa, Homo sapiens
  AACR GENIE Results; KEAP1_p.E192K; A0301
AIGIANFAK

SEQ ID NO: 24486 - protein, 11 aa, Homo sapiens
  AACR GENIE Results; KEAP1_p.E192K; A3101
KQIGCVELHQR

SEQ ID NO: 24487 - protein, 10 aa, Homo sapiens
  AACR GENIE Results; KEAP1_p.E192K; A1101
NAIGIANFAK

SEQ ID NO: 24488 - protein, 8 aa, Homo sapiens
  AACR GENIE Results; KEAP1_p.E192K; B5101
IANFAKQI

SEQ ID NO: 24489 - protein, 9 aa, Homo sapiens
  AACR GENIE Results; KEAP1_p.E192K; B1501
KQIGCVELH

SEQ ID NO: 24490 - protein, 8 aa, Homo sapiens
  AACR GENIE Results; KEAP1_p.E192K; B1501
KQIGCVEL

SEQ ID NO: 24491 - protein, 9 aa, Homo sapiens
  AACR GENIE Results; KEAP1_p.E219K; B4403
GEVAKQEKF

SEQ ID NO: 24492 - protein, 9 aa, Homo sapiens
  AACR GENIE Results; KEAP1_p.E219K; B4001
GEVAKQEKF

SEQ ID NO: 24493 - protein, 10 aa, Homo sapiens
  AACR GENIE Results; KEAP1_p.E219K; B4403
GEVAKQEKFF

SEQ ID NO: 24494 - protein, 9 aa, Homo sapiens
  AACR GENIE Results; KEAP1_p.E219K; B4402
GEVAKQEKF

SEQ ID NO: 24495 - protein, 9 aa, Homo sapiens
  AACR GENIE Results; KEAP1_p.E219K; A2601
EVAKQEKFF

SEQ ID NO: 24496 - protein, 10 aa, Homo sapiens
  AACR GENIE Results; KEAP1_p.E219K; B4402
GEVAKQEKFF

SEQ ID NO: 24497 - protein, 9 aa, Homo sapiens
  AACR GENIE Results; KEAP1_p.E542Dfs*31; A1101
RSPHEAPAK

SEQ ID NO: 24498 - protein, 9 aa, Homo sapiens
  AACR GENIE Results; KEAP1_p.E542Dfs*31; B0702
SPHEAPAKC

SEQ ID NO: 24499 - protein, 8 aa, Homo sapiens
  AACR GENIE Results; KEAP1_p.G186C; B5101
DPSNAICI

SEQ ID NO: 24500 - protein, 10 aa, Homo sapiens
  AACR GENIE Results; KEAP1_p.G186C; A0201
QLDPSNAICI

SEQ ID NO: 24501 - protein, 10 aa, Homo sapiens
  AACR GENIE Results; KEAP1_p.G186C; B4001
QLDPSNAICI

SEQ ID NO: 24502 - protein, 11 aa, Homo sapiens
  AACR GENIE Results; KEAP1_p.G186V; B3501
DPSNAIVIANF

SEQ ID NO: 24503 - protein, 9 aa, Homo sapiens
  AACR GENIE Results; KEAP1_p.G186V; A0201
QLDPSNAIV

SEQ ID NO: 24504 - protein, 8 aa, Homo sapiens
  AACR GENIE Results; KEAP1_p.G186V; B3501
DPSNAIVI

SEQ ID NO: 24505 - protein, 9 aa, Homo sapiens
  AACR GENIE Results; KEAP1_p.G332Afs*68; B3501
TAAATSDSR

SEQ ID NO: 24506 - protein, 11 aa, Homo sapiens
  AACR GENIE Results; KEAP1_p.G332Afs*68; B4402
AATSDSRSATW

SEQ ID NO: 24507 - protein, 10 aa, Homo sapiens
  AACR GENIE Results; KEAP1_p.G332Afs*68; B3501
TPVTAPGSGW

SEQ ID NO: 24508 - protein, 9 aa, Homo sapiens
  AACR GENIE Results; KEAP1_p.G332Afs*68; A0101
TSDSRSATW

SEQ ID NO: 24509 - protein, 11 aa, Homo sapiens
  AACR GENIE Results; KEAP1_p.G332Afs*68; A0101
YTAAATSDSRS

SEQ ID NO: 24510 - protein, 10 aa, Homo sapiens
  AACR GENIE Results; KEAP1_p.G332Afs*68; B0702
TPAPWTVTTP

SEQ ID NO: 24511 - protein, 9 aa, Homo sapiens
  AACR GENIE Results; KEAP1_p.G332Afs*68; A1101
LTTPVTAPG

SEQ ID NO: 24512 - protein, 9 aa, Homo sapiens
  AACR GENIE Results; KEAP1_p.G332Afs*68; B3501
TATPTPAPW

SEQ ID NO: 24513 - protein, 10 aa, Homo sapiens
  AACR GENIE Results; KEAP1_p.G332Afs*68; B4402
ATSDSRSATW

SEQ ID NO: 24514 - protein, 8 aa, Homo sapiens
  AACR GENIE Results; KEAP1_p.G332Afs*68; B4402
SDSRSATW

SEQ ID NO: 24515 - protein, 9 aa, Homo sapiens
  AACR GENIE Results; KEAP1_p.G332Afs*68; B4402
TSDSRSATW

SEQ ID NO: 24516 - protein, 8 aa, Homo sapiens
  AACR GENIE Results; KEAP1_p.G332C; B0801
CGYFRQSL

SEQ ID NO: 24517 - protein, 9 aa, Homo sapiens
  AACR GENIE Results; KEAP1_p.G333C; A2902
CYFRQSLSY

SEQ ID NO: 24518 - protein, 8 aa, Homo sapiens
  AACR GENIE Results; KEAP1_p.G333C; C1402
IYTAGCYF

SEQ ID NO: 24519 - protein, 9 aa, Homo sapiens
  AACR GENIE Results; KEAP1_p.G333C; C1402
CYFRQSLSY

SEQ ID NO: 24520 - protein, 9 aa, Homo sapiens
  AACR GENIE Results; KEAP1_p.G333C; A3101
IYTAGCYFR

SEQ ID NO: 24521 - protein, 9 aa, Homo sapiens
  AACR GENIE Results; KEAP1_p.G333C; B1501
RLIYTAGCY

SEQ ID NO: 24522 - protein, 8 aa, Homo sapiens
  AACR GENIE Results; KEAP1_p.G333C; A2301
IYTAGCYF

SEQ ID NO: 24523 - protein, 9 aa, Homo sapiens
  AACR GENIE Results; KEAP1_p.G371S; A6802
VVSGLLYAV

SEQ ID NO: 24524 - protein, 9 aa, Homo sapiens
  AACR GENIE Results; KEAP1_p.G371S; A0205
VVSGLLYAV

SEQ ID NO: 24525 - protein, 9 aa, Homo sapiens
  AACR GENIE Results; KEAP1_p.G371S; A0201
VVSGLLYAV

SEQ ID NO: 24526 - protein, 9 aa, Homo sapiens
  AACR GENIE Results; KEAP1_p.G371S; B1302
VVSGLLYAV

SEQ ID NO: 24527 - protein, 9 aa, Homo sapiens
  AACR GENIE Results; KEAP1_p.G371S; B5001
CVVSGLLYA

SEQ ID NO: 24528 - protein, 9 aa, Homo sapiens
  AACR GENIE Results; KEAP1_p.G371S; B1501
GCVVSGLLY

SEQ ID NO: 24529 - protein, 9 aa, Homo sapiens
  AACR GENIE Results; KEAP1_p.G371S; B5001
VVSGLLYAV

SEQ ID NO: 24530 - protein, 9 aa, Homo sapiens
  AACR GENIE Results; KEAP1_p.G371S; B1503
GCVVSGLLY

SEQ ID NO: 24531 - protein, 10 aa, Homo sapiens
  AACR GENIE Results; KEAP1_p.G371S; A6802
CVVSGLLYAV

SEQ ID NO: 24532 - protein, 9 aa, Homo sapiens
  AACR GENIE Results; KEAP1_p.G371S; C1502
VVSGLLYAV

SEQ ID NO: 24533 - protein, 10 aa, Homo sapiens
  AACR GENIE Results; KEAP1_p.G371S; B2702
SGLLYAVGGR

SEQ ID NO: 24534 - protein, 8 aa, Homo sapiens
  AACR GENIE Results; KEAP1_p.G371S; B5801
VSGLLYAV

SEQ ID NO: 24535 - protein, 9 aa, Homo sapiens
  AACR GENIE Results; KEAP1_p.G371S; A3101
VVSGLLYAV

SEQ ID NO: 24536 - protein, 9 aa, Homo sapiens
  AACR GENIE Results; KEAP1_p.G371S; A0205
CVVSGLLYA

SEQ ID NO: 24537 - protein, 9 aa, Homo sapiens
  AACR GENIE Results; KEAP1_p.G371S; A2902
GCVVSGLLY

SEQ ID NO: 24538 - protein, 9 aa, Homo sapiens
  AACR GENIE Results; KEAP1_p.G371S; A3001
VVSGLLYAV

SEQ ID NO: 24539 - protein, 11 aa, Homo sapiens
  AACR GENIE Results; KEAP1_p.G417V; B3501
IVVGVIDGHIY

SEQ ID NO: 24540 - protein, 10 aa, Homo sapiens
  AACR GENIE Results; KEAP1_p.G417V; B0702
VPRNRIVVGV

SEQ ID NO: 24541 - protein, 8 aa, Homo sapiens
  AACR GENIE Results; KEAP1_p.G429V; B5101
DGHIYAVV

SEQ ID NO: 24542 - protein, 9 aa, Homo sapiens
  AACR GENIE Results; KEAP1_p.G429V; A0301
HIYAVVGSH

SEQ ID NO: 24543 - protein, 9 aa, Homo sapiens
  AACR GENIE Results; KEAP1_p.G430C; A0301
HIYAVGCSH

SEQ ID NO: 24544 - protein, 8 aa, Homo sapiens
  AACR GENIE Results; KEAP1_p.G480V; C0401
GFDVTNRL

SEQ ID NO: 24545 - protein, 10 aa, Homo sapiens
  AACR GENIE Results; KEAP1_p.G480V; A1101
AVGGFDVTNR

SEQ ID NO: 24546 - protein, 9 aa, Homo sapiens
  AACR GENIE Results; KEAP1_p.G480V; B0801
DVTNRLNSA

SEQ ID NO: 24547 - protein, 10 aa, Homo sapiens
  AACR GENIE Results; KEAP1_p.G480V; A0201
LLYAVGGFDV

SEQ ID NO: 24548 - protein, 9 aa, Homo sapiens
  AACR GENIE Results; KEAP1_p.G480V; B4001
GGFDVTNRL

SEQ ID NO: 24549 - protein, 8 aa, Homo sapiens
  AACR GENIE Results; KEAP1_p.G480V; C0303
YAVGGFDV

SEQ ID NO: 24550 - protein, 8 aa, Homo sapiens
  AACR GENIE Results; KEAP1_p.G480V; C0304
YAVGGFDV

SEQ ID NO: 24551 - protein, 9 aa, Homo sapiens
  AACR GENIE Results; KEAP1_p.G480V; B3501
YAVGGFDVT

SEQ ID NO: 24552 - protein, 10 aa, Homo sapiens
  AACR GENIE Results; KEAP1_p.G480V; A0201
YAVGGFDVTN

SEQ ID NO: 24553 - protein, 8 aa, Homo sapiens
  AACR GENIE Results; KEAP1_p.G480V; B3501
YAVGGFDV

SEQ ID NO: 24554 - protein, 10 aa, Homo sapiens
  AACR GENIE Results; KEAP1_p.G480W; A3101
AVGGFDWTNR

SEQ ID NO: 24555 - protein, 10 aa, Homo sapiens
  AACR GENIE Results; KEAP1_p.G480W; B5701
LLYAVGGFDW

SEQ ID NO: 24556 - protein, 8 aa, Homo sapiens
  AACR GENIE Results; KEAP1_p.G480W; B5701
YAVGGFDW

SEQ ID NO: 24557 - protein, 9 aa, Homo sapiens
  AACR GENIE Results; KEAP1_p.G480W; A2402
LYAVGGFDW

SEQ ID NO: 24558 - protein, 9 aa, Homo sapiens
  AACR GENIE Results; KEAP1_p.G480W; A2301
LYAVGGFDW

SEQ ID NO: 24559 - protein, 8 aa, Homo sapiens
  AACR GENIE Results; KEAP1_p.G480W; C1601
YAVGGFDW

SEQ ID NO: 24560 - protein, 9 aa, Homo sapiens
  AACR GENIE Results; KEAP1_p.G509W; B3501
TAMNTIRSW

SEQ ID NO: 24561 - protein, 9 aa, Homo sapiens
  AACR GENIE Results; KEAP1_p.G511S; B0702
TIRSGASVC

SEQ ID NO: 24562 - protein, 11 aa, Homo sapiens
  AACR GENIE Results; KEAP1_p.G511S; A0301
TIRSGASVCVL

SEQ ID NO: 24563 - protein, 9 aa, Homo sapiens
  AACR GENIE Results; KEAP1_p.G511S; C0304
NTIRSGASV

SEQ ID NO: 24564 - protein, 9 aa, Homo sapiens
  AACR GENIE Results; KEAP1_p.G511S; A2601
NTIRSGASV

SEQ ID NO: 24565 - protein, 8 aa, Homo sapiens
  AACR GENIE Results; KEAP1_p.G524Afs*8; B5101
YAAGAMMV

SEQ ID NO: 24566 - protein, 8 aa, Homo sapiens
  AACR GENIE Results; KEAP1_p.G524Afs*8; C1203
YAAGAMMV

SEQ ID NO: 24567 - protein, 9 aa, Homo sapiens
  AACR GENIE Results; KEAP1_p.G524Afs*8; A2402
IYAAGAMMV

SEQ ID NO: 24568 - protein, 8 aa, Homo sapiens
  AACR GENIE Results; KEAP1_p.G524Afs*8; A1101
AAGAMMVR

SEQ ID NO: 24569 - protein, 8 aa, Homo sapiens
  AACR GENIE Results; KEAP1_p.G524Afs*8; B1501
GAMMVRTS

SEQ ID NO: 24570 - protein, 9 aa, Homo sapiens
  AACR GENIE Results; KEAP1_p.G524Afs*8; A1101
YAAGAMMVR

SEQ ID NO: 24571 - protein, 8 aa, Homo sapiens
  AACR GENIE Results; KEAP1_p.G524Afs*8; B3501
YAAGAMMV

SEQ ID NO: 24572 - protein, 9 aa, Homo sapiens
  AACR GENIE Results; KEAP1_p.G524Afs*8; B3501
YAAGAMMVR

SEQ ID NO: 24573 - protein, 8 aa, Homo sapiens
  AACR GENIE Results; KEAP1_p.G558R; B1501
SALRITVH

SEQ ID NO: 24574 - protein, 9 aa, Homo sapiens
  AACR GENIE Results; KEAP1_p.G558R; C0602
RRSALRITV

SEQ ID NO: 24575 - protein, 11 aa, Homo sapiens
  AACR GENIE Results; KEAP1_p.G558W; A3101
SALWITVHQGR

SEQ ID NO: 24576 - protein, 9 aa, Homo sapiens
  AACR GENIE Results; KEAP1_p.G603V; B3501
SVVGVAVTM

SEQ ID NO: 24577 - protein, 9 aa, Homo sapiens
  AACR GENIE Results; KEAP1_p.G603V; B1501
SVVGVAVTM

SEQ ID NO: 24578 - protein, 9 aa, Homo sapiens
  AACR GENIE Results; KEAP1_p.G603V; A2601
SVVGVAVTM

SEQ ID NO: 24579 - protein, 9 aa, Homo sapiens
  AACR GENIE Results; KEAP1_p.G603V; C0304
SVVGVAVTM

SEQ ID NO: 24580 - protein, 9 aa, Homo sapiens
  AACR GENIE Results; KEAP1_p.G603V; C0202
SVVGVAVTM

SEQ ID NO: 24581 - protein, 9 aa, Homo sapiens
  AACR GENIE Results; KEAP1_p.G603V; C0303
SVVGVAVTM

SEQ ID NO: 24582 - protein, 9 aa, Homo sapiens
  AACR GENIE Results; KEAP1_p.G603V; A1101
SVVGVAVTM

SEQ ID NO: 24583 - protein, 9 aa, Homo sapiens
  AACR GENIE Results; KEAP1_p.G603V; B0702
SVVGVAVTM

SEQ ID NO: 24584 - protein, 10 aa, Homo sapiens
  AACR GENIE Results; KEAP1_p.G603V; B0702
SGRSVVGVAV

SEQ ID NO: 24585 - protein, 9 aa, Homo sapiens
  AACR GENIE Results; KEAP1_p.G603V; C1203
SVVGVAVTM

SEQ ID NO: 24586 - protein, 9 aa, Homo sapiens
  AACR GENIE Results; KEAP1_p.G603V; C0602
GRSVVGVAV

SEQ ID NO: 24587 - protein, 8 aa, Homo sapiens
  AACR GENIE Results; KEAP1_p.G603V; B3501
VVGVAVTM

SEQ ID NO: 24588 - protein, 9 aa, Homo sapiens
  AACR GENIE Results; KEAP1_p.G603W; B3501
SWVGVAVTM

SEQ ID NO: 24589 - protein, 9 aa, Homo sapiens
  AACR GENIE Results; KEAP1_p.G603W; C0602
GRSWVGVAV

SEQ ID NO: 24590 - protein, 9 aa, Homo sapiens
  AACR GENIE Results; KEAP1_p.H311R; B0702
TLRKPTQVM

SEQ ID NO: 24591 - protein, 9 aa, Homo sapiens
  AACR GENIE Results; KEAP1_p.H311R; B1501
TLRKPTQVM

SEQ ID NO: 24592 - protein, 10 aa, Homo sapiens
  AACR GENIE Results; KEAP1_p.H311R; A0301
KIFEELTLRK

SEQ ID NO: 24593 - protein, 11 aa, Homo sapiens
  AACR GENIE Results; KEAP1_p.L237V; A6801
TLISRDDVNVR

SEQ ID NO: 24594 - protein, 9 aa, Homo sapiens
  AACR GENIE Results; KEAP1_p.L237V; A6801
ISRDDVNVR

SEQ ID NO: 24595 - protein, 9 aa, Homo sapiens
  AACR GENIE Results; KEAP1_p.L237V; B5701
ISRDDVNVR

SEQ ID NO: 24596 - protein, 9 aa, Homo sapiens
  AACR GENIE Results; KEAP1_p.L281M; B0702
TPNFMQMQL

SEQ ID NO: 24597 - protein, 9 aa, Homo sapiens
  AACR GENIE Results; KEAP1_p.L281M; B3501
TPNFMQMQL

SEQ ID NO: 24598 - protein, 9 aa, Homo sapiens
  AACR GENIE Results; KEAP1_p.L281M; B1501
SLTPNFMQM

SEQ ID NO: 24599 - protein, 9 aa, Homo sapiens
  AACR GENIE Results; KEAP1_p.L70P; B4001
NEPRLSQQL

SEQ ID NO: 24600 - protein, 8 aa, Homo sapiens
  AACR GENIE Results; KEAP1_p.L70P; B0702
EPRLSQQL

SEQ ID NO: 24601 - protein, 10 aa, Homo sapiens
  AACR GENIE Results; KEAP1_p.L70P; A6801
QAFGIMNEPR

SEQ ID NO: 24602 - protein, 11 aa, Homo sapiens
  AACR GENIE Results; KEAP1_p.L70P; A0201
IMNEPRLSQQL

SEQ ID NO: 24603 - protein, 9 aa, Homo sapiens
  AACR GENIE Results; KEAP1_p.L70P; C0304
FGIMNEPRL

SEQ ID NO: 24604 - protein, 11 aa, Homo sapiens
  AACR GENIE Results; KEAP1_p.L70P; B1501
IMNEPRLSQQL

SEQ ID NO: 24605 - protein, 9 aa, Homo sapiens
  AACR GENIE Results; KEAP1_p.L70P; B1801
NEPRLSQQL

SEQ ID NO: 24606 - protein, 8 aa, Homo sapiens
  AACR GENIE Results; KEAP1_p.L70P; B0801
EPRLSQQL

SEQ ID NO: 24607 - protein, 9 aa, Homo sapiens
  AACR GENIE Results; KEAP1_p.L70P; A0201
FGIMNEPRL

SEQ ID NO: 24608 - protein, 9 aa, Homo sapiens
  AACR GENIE Results; KEAP1_p.L70P; B4403
NEPRLSQQL

SEQ ID NO: 24609 - protein, 9 aa, Homo sapiens
  AACR GENIE Results; KEAP1_p.M161I; B3501
HVMNGAVIY

SEQ ID NO: 24610 - protein, 9 aa, Homo sapiens
  AACR GENIE Results; KEAP1_p.M161I; A0201
AVIYQIDSV

SEQ ID NO: 24611 - protein, 11 aa, Homo sapiens
  AACR GENIE Results; KEAP1_p.M161I; A1101
AVIYQIDSVVR

SEQ ID NO: 24612 - protein, 10 aa, Homo sapiens
  AACR GENIE Results; KEAP1_p.M161I; A1101
VIYQIDSVVR

SEQ ID NO: 24613 - protein, 9 aa, Homo sapiens
  AACR GENIE Results; KEAP1_p.M610I; B5101
SGVGVAVTI

SEQ ID NO: 24614 - protein, 8 aa, Homo sapiens
  AACR GENIE Results; KEAP1_p.M610I; A1101
VTIEPCRK

SEQ ID NO: 24615 - protein, 9 aa, Homo sapiens
  AACR GENIE Results; KEAP1_p.M610I; A1101
AVTIEPCRK

SEQ ID NO: 24616 - protein, 9 aa, Homo sapiens
  AACR GENIE Results; KEAP1_p.M67V; C1203
QAFGIVNEL

SEQ ID NO: 24617 - protein, 9 aa, Homo sapiens
  AACR GENIE Results; KEAP1_p.M67V; B3501
QAFGIVNEL

SEQ ID NO: 24618 - protein, 9 aa, Homo sapiens
  AACR GENIE Results; KEAP1_p.M67V; C0202
QAFGIVNEL

SEQ ID NO: 24619 - protein, 9 aa, Homo sapiens
  AACR GENIE Results; KEAP1_p.M67V; C0304
QAFGIVNEL

SEQ ID NO: 24620 - protein, 9 aa, Homo sapiens
  AACR GENIE Results; KEAP1_p.M67V; C0303
QAFGIVNEL

SEQ ID NO: 24621 - protein, 9 aa, Homo sapiens
  AACR GENIE Results; KEAP1_p.M67V; A6801
QAFGIVNEL

SEQ ID NO: 24622 - protein, 9 aa, Homo sapiens
  AACR GENIE Results; KEAP1_p.M67V; B5101
QAFGIVNEL

SEQ ID NO: 24623 - protein, 9 aa, Homo sapiens
  AACR GENIE Results; KEAP1_p.M67V; C0602
QAFGIVNEL

SEQ ID NO: 24624 - protein, 9 aa, Homo sapiens
  AACR GENIE Results; KEAP1_p.M67V; B1501
QAFGIVNEL

SEQ ID NO: 24625 - protein, 10 aa, Homo sapiens
  AACR GENIE Results; KEAP1_p.M67V; B1501
KQAFGIVNEL

SEQ ID NO: 24626 - protein, 9 aa, Homo sapiens
  AACR GENIE Results; KEAP1_p.M67V; C1601
QAFGIVNEL

SEQ ID NO: 24627 - protein, 10 aa, Homo sapiens
  AACR GENIE Results; KEAP1_p.M67V; A6801
QAFGIVNELR

SEQ ID NO: 24628 - protein, 9 aa, Homo sapiens
  AACR GENIE Results; KEAP1_p.M67V; B0702
QAFGIVNEL

SEQ ID NO: 24629 - protein, 9 aa, Homo sapiens
  AACR GENIE Results; KEAP1_p.M67V; B5701
QAFGIVNEL

SEQ ID NO: 24630 - protein, 9 aa, Homo sapiens
  AACR GENIE Results; KEAP1_p.M67V; C0303
FGIVNELRL

SEQ ID NO: 24631 - protein, 9 aa, Homo sapiens
  AACR GENIE Results; KEAP1_p.M67V; C0304
FGIVNELRL

SEQ ID NO: 24632 - protein, 11 aa, Homo sapiens
  AACR GENIE Results; KEAP1_p.M67V; B0702
IVNELRLSQQL

SEQ ID NO: 24633 - protein, 8 aa, Homo sapiens
  AACR GENIE Results; KEAP1_p.M67V; B1402
AFGIVNEL

SEQ ID NO: 24634 - protein, 9 aa, Homo sapiens
  AACR GENIE Results; KEAP1_p.M67V; A2601
QAFGIVNEL

SEQ ID NO: 24635 - protein, 8 aa, Homo sapiens
  AACR GENIE Results; KEAP1_p.N414Y; B3501
APMSVPRY

SEQ ID NO: 24636 - protein, 8 aa, Homo sapiens
  AACR GENIE Results; KEAP1_p.N414Y; B0702
APMSVPRY

SEQ ID NO: 24637 - protein, 9 aa, Homo sapiens
  AACR GENIE Results; KEAP1_p.P361L; B0801
DLQVLRSGL

SEQ ID NO: 24638 - protein, 9 aa, Homo sapiens
  AACR GENIE Results; KEAP1_p.P361L; A0301
RLADLQVLR

SEQ ID NO: 24639 - protein, 9 aa, Homo sapiens
  AACR GENIE Results; KEAP1_p.P361L; A1101
RLADLQVLR

SEQ ID NO: 24640 - protein, 9 aa, Homo sapiens
  AACR GENIE Results; KEAP1_p.R261W; C0602
QRWFYVQAL

SEQ ID NO: 24641 - protein, 9 aa, Homo sapiens
  AACR GENIE Results; KEAP1_p.R272L; B1402
VQALLRAVL

SEQ ID NO: 24642 - protein, 9 aa, Homo sapiens
  AACR GENIE Results; KEAP1_p.R272L; B1501
VQALLRAVL

SEQ ID NO: 24643 - protein, 8 aa, Homo sapiens
  AACR GENIE Results; KEAP1_p.R272L; B0801
QALLRAVL

SEQ ID NO: 24644 - protein, 8 aa, Homo sapiens
  AACR GENIE Results; KEAP1_p.R272L; B1402
QALLRAVL

SEQ ID NO: 24645 - protein, 9 aa, Homo sapiens
  AACR GENIE Results; KEAP1_p.R272L; B1402
LRAVLCHSL

SEQ ID NO: 24646 - protein, 9 aa, Homo sapiens
  AACR GENIE Results; KEAP1_p.R272L; A0301
ALLRAVLCH

SEQ ID NO: 24647 - protein, 9 aa, Homo sapiens
  AACR GENIE Results; KEAP1_p.R272L; B1302
VQALLRAVL

SEQ ID NO: 24648 - protein, 8 aa, Homo sapiens
  AACR GENIE Results; KEAP1_p.R320L; B5101
MPCLAPKV

SEQ ID NO: 24649 - protein, 9 aa, Homo sapiens
  AACR GENIE Results; KEAP1_p.R320L; B0702
KPTQVMPCL

SEQ ID NO: 24650 - protein, 9 aa, Homo sapiens
  AACR GENIE Results; KEAP1_p.R320L; A1101
QVMPCLAPK

SEQ ID NO: 24651 - protein, 9 aa, Homo sapiens
  AACR GENIE Results; KEAP1_p.R320L; A0301
QVMPCLAPK

SEQ ID NO: 24652 - protein, 8 aa, Homo sapiens
  AACR GENIE Results; KEAP1_p.R362Q; B1501
LQVPQSGL

SEQ ID NO: 24653 - protein, 11 aa, Homo sapiens
  AACR GENIE Results; KEAP1_p.R362Q; C0802
LADLQVPQSGL

SEQ ID NO: 24654 - protein, 9 aa, Homo sapiens
  AACR GENIE Results; KEAP1_p.R362Q; B0801
DLQVPQSGL

SEQ ID NO: 24655 - protein, 9 aa, Homo sapiens
  AACR GENIE Results; KEAP1_p.R413Vfs*45; B3501
TAASTTTVW

SEQ ID NO: 24656 - protein, 9 aa, Homo sapiens
  AACR GENIE Results; KEAP1_p.R413Vfs*45; A0201
SMATSMPSA

SEQ ID NO: 24657 - protein, 9 aa, Homo sapiens
  AACR GENIE Results; KEAP1_p.R413Vfs*45; B3501
MPSAAPTAA

SEQ ID NO: 24658 - protein, 9 aa, Homo sapiens
  AACR GENIE Results; KEAP1_p.R413Vfs*45; C1203
TAASTTTVW

SEQ ID NO: 24659 - protein, 11 aa, Homo sapiens
  AACR GENIE Results; KEAP1_p.R413Vfs*45; B3501
APTAASTTTVW

SEQ ID NO: 24660 - protein, 10 aa, Homo sapiens
  AACR GENIE Results; KEAP1_p.R413Vfs*45; A0201
SMPSAAPTAA

SEQ ID NO: 24661 - protein, 9 aa, Homo sapiens
  AACR GENIE Results; KEAP1_p.R413Vfs*45; B1501
TAASTTTVW

SEQ ID NO: 24662 - protein, 8 aa, Homo sapiens
  AACR GENIE Results; KEAP1_p.R413Vfs*45; B5101
TAASTTTV

SEQ ID NO: 24663 - protein, 10 aa, Homo sapiens
  AACR GENIE Results; KEAP1_p.R413Vfs*45; B0702
APTAASTTTV

SEQ ID NO: 24664 - protein, 8 aa, Homo sapiens
  AACR GENIE Results; KEAP1_p.R413Vfs*45; B3501
MPSAAPTA

SEQ ID NO: 24665 - protein, 8 aa, Homo sapiens
  AACR GENIE Results; KEAP1_p.R413Vfs*45; B5101
MPSAAPTA

SEQ ID NO: 24666 - protein, 9 aa, Homo sapiens
  AACR GENIE Results; KEAP1_p.R413Vfs*45; B3501
TASGWGSSM

SEQ ID NO: 24667 - protein, 9 aa, Homo sapiens
  AACR GENIE Results; KEAP1_p.R413Vfs*45; C1601
STTTVWRGM

SEQ ID NO: 24668 - protein, 9 aa, Homo sapiens
  AACR GENIE Results; KEAP1_p.R413Vfs*45; B0702
MPSAAPTAA

SEQ ID NO: 24669 - protein, 9 aa, Homo sapiens
  AACR GENIE Results; KEAP1_p.R413Vfs*45; A0201
SMPSAAPTA

SEQ ID NO: 24670 - protein, 9 aa, Homo sapiens
  AACR GENIE Results; KEAP1_p.R413Vfs*45; A3201
SQSGMSGTW

SEQ ID NO: 24671 - protein, 9 aa, Homo sapiens
  AACR GENIE Results; KEAP1_p.R413Vfs*45; B1501
SQSGMSGTW

SEQ ID NO: 24672 - protein, 11 aa, Homo sapiens
  AACR GENIE Results; KEAP1_p.R413Vfs*45; B0801
TSMPSAAPTAA

SEQ ID NO: 24673 - protein, 11 aa, Homo sapiens
  AACR GENIE Results; KEAP1_p.R413Vfs*45; A1101
ATSMPSAAPTA

SEQ ID NO: 24674 - protein, 9 aa, Homo sapiens
  AACR GENIE Results; KEAP1_p.R413Vfs*45; C0102
SMPSAAPTA

SEQ ID NO: 24675 - protein, 9 aa, Homo sapiens
  AACR GENIE Results; KEAP1_p.R413Vfs*45; C0304
TASGWGSSM

SEQ ID NO: 24676 - protein, 11 aa, Homo sapiens
  AACR GENIE Results; KEAP1_p.R413Vfs*45; B3501
SGWGSSMATSM

SEQ ID NO: 24677 - protein, 11 aa, Homo sapiens
  AACR GENIE Results; KEAP1_p.R413Vfs*45; B0702
APTAASTTTVW

SEQ ID NO: 24678 - protein, 9 aa, Homo sapiens
  AACR GENIE Results; KEAP1_p.R413Vfs*45; B0702
APTAASTTT

SEQ ID NO: 24679 - protein, 8 aa, Homo sapiens
  AACR GENIE Results; KEAP1_p.R413Vfs*45; B5101
MATSMPSA

SEQ ID NO: 24680 - protein, 10 aa, Homo sapiens
  AACR GENIE Results; KEAP1_p.R415G; B0702
APMSVPRNGI

SEQ ID NO: 24681 - protein, 10 aa, Homo sapiens
  AACR GENIE Results; KEAP1_p.R415G; B0702
VPRNGIGVGV

SEQ ID NO: 24682 - protein, 8 aa, Homo sapiens
  AACR GENIE Results; KEAP1_p.R415G; B0702
VPRNGIGV

SEQ ID NO: 24683 - protein, 8 aa, Homo sapiens
  AACR GENIE Results; KEAP1_p.R415G; B5101
VPRNGIGV

SEQ ID NO: 24684 - protein, 11 aa, Homo sapiens
  AACR GENIE Results; KEAP1_p.R415G; B0702
VPRNGIGVGVI

SEQ ID NO: 24685 - protein, 10 aa, Homo sapiens
  AACR GENIE Results; KEAP1_p.R415G; B5101
VPRNGIGVGV

SEQ ID NO: 24686 - protein, 8 aa, Homo sapiens
  AACR GENIE Results; KEAP1_p.R415G; B5101
NGIGVGVI

SEQ ID NO: 24687 - protein, 11 aa, Homo sapiens
  AACR GENIE Results; KEAP1_p.R415G; B5101
VPRNGIGVGVI

SEQ ID NO: 24688 - protein, 10 aa, Homo sapiens
  AACR GENIE Results; KEAP1_p.R415H; B0702
APMSVPRNHI

SEQ ID NO: 24689 - protein, 10 aa, Homo sapiens
  AACR GENIE Results; KEAP1_p.R415H; B0702
VPRNHIGVGV

SEQ ID NO: 24690 - protein, 8 aa, Homo sapiens
  AACR GENIE Results; KEAP1_p.R415H; B5101
VPRNHIGV

SEQ ID NO: 24691 - protein, 8 aa, Homo sapiens
  AACR GENIE Results; KEAP1_p.R415H; B0702
VPRNHIGV

SEQ ID NO: 24692 - protein, 11 aa, Homo sapiens
  AACR GENIE Results; KEAP1_p.R536P; B4403
VEPYDVETETW

SEQ ID NO: 24693 - protein, 10 aa, Homo sapiens
  AACR GENIE Results; KEAP1_p.R536P; B3501
EPYDVETETW

SEQ ID NO: 24694 - protein, 11 aa, Homo sapiens
  AACR GENIE Results; KEAP1_p.R536P; B4402
VEPYDVETETW

SEQ ID NO: 24695 - protein, 9 aa, Homo sapiens
  AACR GENIE Results; KEAP1_p.R601L; A0201
GLSGVGVAV

SEQ ID NO: 24696 - protein, 9 aa, Homo sapiens
  AACR GENIE Results; KEAP1_p.R601L; B1302
GLSGVGVAV

SEQ ID NO: 24697 - protein, 9 aa, Homo sapiens
  AACR GENIE Results; KEAP1_p.R601L; A2601
EVTRMTSGL

SEQ ID NO: 24698 - protein, 10 aa, Homo sapiens
  AACR GENIE Results; KEAP1_p.R601L; B4001
SEVTRMTSGL

SEQ ID NO: 24699 - protein, 9 aa, Homo sapiens
  AACR GENIE Results; KEAP1_p.R601L; B1501
GLSGVGVAV

SEQ ID NO: 24700 - protein, 10 aa, Homo sapiens
  AACR GENIE Results; KEAP1_p.R601L; A6801
MTSGLSGVGV

SEQ ID NO: 24701 - protein, 9 aa, Homo sapiens
  AACR GENIE Results; KEAP1_p.R601L; A6801
EVTRMTSGL

SEQ ID NO: 24702 - protein, 9 aa, Homo sapiens
  AACR GENIE Results; KEAP1_p.R601L; B3801
GLSGVGVAV

SEQ ID NO: 24703 - protein, 9 aa, Homo sapiens
  AACR GENIE Results; KEAP1_p.R601L; A0201
RMTSGLSGV

SEQ ID NO: 24704 - protein, 9 aa, Homo sapiens
  AACR GENIE Results; KEAP1_p.R601L; A3001
GLSGVGVAV

SEQ ID NO: 24705 - protein, 10 aa, Homo sapiens
  AACR GENIE Results; KEAP1_p.R601L; A3001
SGLSGVGVAV

SEQ ID NO: 24706 - protein, 10 aa, Homo sapiens
  AACR GENIE Results; KEAP1_p.R601L; A0201
SGLSGVGVAV

SEQ ID NO: 24707 - protein, 11 aa, Homo sapiens
  AACR GENIE Results; KEAP1_p.R601L; A6801
MTSGLSGVGVA

SEQ ID NO: 24708 - protein, 8 aa, Homo sapiens
  AACR GENIE Results; KEAP1_p.R601L; C1502
LSGVGVAV

SEQ ID NO: 24709 - protein, 9 aa, Homo sapiens
  AACR GENIE Results; KEAP1_p.R601L; B2705
GLSGVGVAV

SEQ ID NO: 24710 - protein, 8 aa, Homo sapiens
  AACR GENIE Results; KEAP1_p.R601L; C0304
LSGVGVAV

SEQ ID NO: 24711 - protein, 10 aa, Homo sapiens
  AACR GENIE Results; KEAP1_p.R601L; B1302
SGLSGVGVAV

SEQ ID NO: 24712 - protein, 10 aa, Homo sapiens
  AACR GENIE Results; KEAP1_p.R601L; B1302
MTSGLSGVGV

SEQ ID NO: 24713 - protein, 8 aa, Homo sapiens
  AACR GENIE Results; KEAP1_p.R601L; C1203
LSGVGVAV

SEQ ID NO: 24714 - protein, 8 aa, Homo sapiens
  AACR GENIE Results; KEAP1_p.R601L; A3001
VTRMTSGL

SEQ ID NO: 24715 - protein, 8 aa, Homo sapiens
  AACR GENIE Results; KEAP1_p.R601L; C1601
LSGVGVAV

SEQ ID NO: 24716 - protein, 8 aa, Homo sapiens
  AACR GENIE Results; KEAP1_p.R601L; B0702
VTRMTSGL

SEQ ID NO: 24717 - protein, 8 aa, Homo sapiens
  AACR GENIE Results; KEAP1_p.R601L; B1501
VTRMTSGL

SEQ ID NO: 24718 - protein, 10 aa, Homo sapiens
  AACR GENIE Results; KEAP1_p.R601L; A1101
SGLSGVGVAV

SEQ ID NO: 24719 - protein, 8 aa, Homo sapiens
  AACR GENIE Results; KEAP1_p.R601L; C0303
LSGVGVAV

SEQ ID NO: 24720 - protein, 9 aa, Homo sapiens
  AACR GENIE Results; KEAP1_p.R71L; B1801
NELLLSQQL

SEQ ID NO: 24721 - protein, 9 aa, Homo sapiens
  AACR GENIE Results; KEAP1_p.R71L; B4001
NELLLSQQL

SEQ ID NO: 24722 - protein, 9 aa, Homo sapiens
  AACR GENIE Results; KEAP1_p.R71L; B4403
NELLLSQQL

SEQ ID NO: 24723 - protein, 9 aa, Homo sapiens
  AACR GENIE Results; KEAP1_p.R71L; A0201
LLSQQLCDV

SEQ ID NO: 24724 - protein, 9 aa, Homo sapiens
  AACR GENIE Results; KEAP1_p.R71L; B4402
NELLLSQQL

SEQ ID NO: 24725 - protein, 10 aa, Homo sapiens
  AACR GENIE Results; KEAP1_p.R71L; A0201
LLLSQQLCDV

SEQ ID NO: 24726 - protein, 9 aa, Homo sapiens
  AACR GENIE Results; KEAP1_p.T142M; C0304
FAYMASISM

SEQ ID NO: 24727 - protein, 9 aa, Homo sapiens
  AACR GENIE Results; KEAP1_p.T142M; B3501
FAYMASISM

SEQ ID NO: 24728 - protein, 9 aa, Homo sapiens
  AACR GENIE Results; KEAP1_p.T142M; C1203
FAYMASISM

SEQ ID NO: 24729 - protein, 10 aa, Homo sapiens
  AACR GENIE Results; KEAP1_p.T142M; A0301
YMASISMGEK

SEQ ID NO: 24730 - protein, 9 aa, Homo sapiens
  AACR GENIE Results; KEAP1_p.T142M; A0301
MASISMGEK

SEQ ID NO: 24731 - protein, 9 aa, Homo sapiens
  AACR GENIE Results; KEAP1_p.T142M; A1101
MASISMGEK

SEQ ID NO: 24732 - protein, 8 aa, Homo sapiens
  AACR GENIE Results; KEAP1_p.V155F; B1501
FMNGAVMY

SEQ ID NO: 24733 - protein, 8 aa, Homo sapiens
  AACR GENIE Results; KEAP1_p.V155F; B3501
FMNGAVMY

SEQ ID NO: 24734 - protein, 9 aa, Homo sapiens
  AACR GENIE Results; KEAP1_p.V168F; B1501
VMYQIDSVF

SEQ ID NO: 24735 - protein, 9 aa, Homo sapiens
  AACR GENIE Results; KEAP1_p.V168F; A0201
YQIDSVFRA

SEQ ID NO: 24736 - protein, 10 aa, Homo sapiens
  AACR GENIE Results; KEAP1_p.V168F; B1501
AVMYQIDSVF

SEQ ID NO: 24737 - protein, 11 aa, Homo sapiens
  AACR GENIE Results; KEAP1_p.V168F; A1101
AVMYQIDSVFR

SEQ ID NO: 24738 - protein, 9 aa, Homo sapiens
  AACR GENIE Results; KEAP1_p.V168F; B1501
YQIDSVFRA

SEQ ID NO: 24739 - protein, 10 aa, Homo sapiens
  AACR GENIE Results; KEAP1_p.V168F; A1101
VMYQIDSVFR

SEQ ID NO: 24740 - protein, 10 aa, Homo sapiens
  AACR GENIE Results; KEAP1_p.V271L; C1402
FYVQALLRAL

SEQ ID NO: 24741 - protein, 9 aa, Homo sapiens
  AACR GENIE Results; KEAP1_p.V271L; C0303
YVQALLRAL

SEQ ID NO: 24742 - protein, 8 aa, Homo sapiens
  AACR GENIE Results; KEAP1_p.V271L; B1501
VQALLRAL

SEQ ID NO: 24743 - protein, 8 aa, Homo sapiens
  AACR GENIE Results; KEAP1_p.V271L; B1402
VQALLRAL

SEQ ID NO: 24744 - protein, 9 aa, Homo sapiens
  AACR GENIE Results; KEAP1_p.V271L; C0304
YVQALLRAL

SEQ ID NO: 24745 - protein, 9 aa, Homo sapiens
  AACR GENIE Results; KEAP1_p.V271L; B0801
YVQALLRAL

SEQ ID NO: 24746 - protein, 9 aa, Homo sapiens
  AACR GENIE Results; KEAP1_p.V271L; C0102
YVQALLRAL

SEQ ID NO: 24747 - protein, 9 aa, Homo sapiens
  AACR GENIE Results; KEAP1_p.V271L; B0702
YVQALLRAL

SEQ ID NO: 24748 - protein, 9 aa, Homo sapiens
  AACR GENIE Results; KEAP1_p.V271L; C1402
YVQALLRAL

SEQ ID NO: 24749 - protein, 9 aa, Homo sapiens
  AACR GENIE Results; KEAP1_p.V271L; A6802
YVQALLRAL

SEQ ID NO: 24750 - protein, 9 aa, Homo sapiens
  AACR GENIE Results; KEAP1_p.V271L; A0301
YVQALLRAL

SEQ ID NO: 24751 - protein, 9 aa, Homo sapiens
  AACR GENIE Results; KEAP1_p.V271L; C1502
YVQALLRAL

SEQ ID NO: 24752 - protein, 11 aa, Homo sapiens
  AACR GENIE Results; KEAP1_p.V568F; A2402
YFLGGYDGHTF

SEQ ID NO: 24753 - protein, 9 aa, Homo sapiens
  AACR GENIE Results; KEAP1_p.W252L; B3501
HACINLVKY

SEQ ID NO: 24754 - protein, 9 aa, Homo sapiens
  AACR GENIE Results; KEAP1_p.Y162C; A0201
AVMCQIDSV

SEQ ID NO: 24755 - protein, 9 aa, Homo sapiens
  AACR GENIE Results; KEAP1_p.Y162C; A0201
CQIDSVVRA

SEQ ID NO: 24756 - protein, 9 aa, Homo sapiens
  AACR GENIE Results; KEAP1_p.Y162C; B1501
CQIDSVVRA

SEQ ID NO: 24757 - protein, 11 aa, Homo sapiens
  AACR GENIE Results; KIT_p.G265S; B4002
SDFNYERQATL

SEQ ID NO: 24758 - protein, 9 aa, Homo sapiens
  AACR GENIE Results; KIT_p.G265S; B5001
SDFNYERQA

SEQ ID NO: 24759 - protein, 9 aa, Homo sapiens
  AACR GENIE Results; KIT_p.G265S; A6802
HHSDFNYER

SEQ ID NO: 24760 - protein, 8 aa, Homo sapiens
  AACR GENIE Results; KIT_p.G265S; A3303
HSDFNYER

SEQ ID NO: 24761 - protein, 10 aa, Homo sapiens
  AACR GENIE Results; KIT_p.L576P; A2901
VYIDPTQPPY

SEQ ID NO: 24762 - protein, 9 aa, Homo sapiens
  AACR GENIE Results; KIT_p.L576P; A0101
YIDPTQPPY

SEQ ID NO: 24763 - protein, 10 aa, Homo sapiens
  AACR GENIE Results; KIT_p.L576P; A2902
VYIDPTQPPY

SEQ ID NO: 24764 - protein, 9 aa, Homo sapiens
  AACR GENIE Results; KIT_p.L576P; A2901
YIDPTQPPY

SEQ ID NO: 24765 - protein, 9 aa, Homo sapiens
  AACR GENIE Results; KIT_p.L576P; C0302
YIDPTQPPY

SEQ ID NO: 24766 - protein, 9 aa, Homo sapiens
  AACR GENIE Results; KIT_p.L576P; B3901
YIDPTQPPY

SEQ ID NO: 24767 - protein, 10 aa, Homo sapiens
  AACR GENIE Results; KIT_p.L576P; A3002
VYIDPTQPPY

SEQ ID NO: 24768 - protein, 9 aa, Homo sapiens
  AACR GENIE Results; KIT_p.L576P; B3508
YIDPTQPPY

SEQ ID NO: 24769 - protein, 10 aa, Homo sapiens
  AACR GENIE Results; KIT_p.L576P; C1402
VYIDPTQPPY

SEQ ID NO: 24770 - protein, 9 aa, Homo sapiens
  AACR GENIE Results; KIT_p.L576P; B1502
YIDPTQPPY

SEQ ID NO: 24771 - protein, 9 aa, Homo sapiens
  AACR GENIE Results; KIT_p.L576P; B3501
YIDPTQPPY

SEQ ID NO: 24772 - protein, 9 aa, Homo sapiens
  AACR GENIE Results; KIT_p.L576P; B5801
YIDPTQPPY

SEQ ID NO: 24773 - protein, 9 aa, Homo sapiens
  AACR GENIE Results; KIT_p.L576P; A2902
YIDPTQPPY

SEQ ID NO: 24774 - protein, 9 aa, Homo sapiens
  AACR GENIE Results; KIT_p.L576P; A0207
YIDPTQPPY

SEQ ID NO: 24775 - protein, 10 aa, Homo sapiens
  AACR GENIE Results; KIT_p.L576P; A2301
VYIDPTQPPY

SEQ ID NO: 24776 - protein, 9 aa, Homo sapiens
  AACR GENIE Results; KIT_p.L576P; A1101
YIDPTQPPY

SEQ ID NO: 24777 - protein, 9 aa, Homo sapiens
  AACR GENIE Results; KIT_p.L576P; A2601
YIDPTQPPY

SEQ ID NO: 24778 - protein, 10 aa, Homo sapiens
  AACR GENIE Results; KIT_p.L576P; B4601
VYIDPTQPPY

SEQ ID NO: 24779 - protein, 9 aa, Homo sapiens
  AACR GENIE Results; KIT_p.L576P; A0201
YIDPTQPPY

SEQ ID NO: 24780 - protein, 9 aa, Homo sapiens
  AACR GENIE Results; KIT_p.L576P; C0801
YIDPTQPPY

SEQ ID NO: 24781 - protein, 9 aa, Homo sapiens
  AACR GENIE Results; KIT_p.L576P; B2702
YIDPTQPPY

SEQ ID NO: 24782 - protein, 9 aa, Homo sapiens
  AACR GENIE Results; KIT_p.L576P; A3303
VYIDPTQPP

SEQ ID NO: 24783 - protein, 11 aa, Homo sapiens
  AACR GENIE Results; KIT_p.L576P; A2901
YVYIDPTQPPY

SEQ ID NO: 24784 - protein, 9 aa, Homo sapiens
  AACR GENIE Results; KIT_p.L576P; A2901
VYIDPTQPP

SEQ ID NO: 24785 - protein, 9 aa, Homo sapiens
  AACR GENIE Results; KIT_p.L576P; B1501
YIDPTQPPY

SEQ ID NO: 24786 - protein, 9 aa, Homo sapiens
  AACR GENIE Results; KIT_p.L576P; B3502
YIDPTQPPY

SEQ ID NO: 24787 - protein, 10 aa, Homo sapiens
  AACR GENIE Results; KIT_p.L576P; B1503
VYIDPTQPPY

SEQ ID NO: 24788 - protein, 10 aa, Homo sapiens
  AACR GENIE Results; KIT_p.L576P; B2702
VYIDPTQPPY

SEQ ID NO: 24789 - protein, 9 aa, Homo sapiens
  AACR GENIE Results; KIT_p.L576P; A6801
YIDPTQPPY

SEQ ID NO: 24790 - protein, 9 aa, Homo sapiens
  AACR GENIE Results; KIT_p.L576P; A0301
YIDPTQPPY

SEQ ID NO: 24791 - protein, 11 aa, Homo sapiens
  AACR GENIE Results; KIT_p.L576P; A2902
YVYIDPTQPPY

SEQ ID NO: 24792 - protein, 10 aa, Homo sapiens
  AACR GENIE Results; KIT_p.L576P; A2402
VYIDPTQPPY

SEQ ID NO: 24793 - protein, 10 aa, Homo sapiens
  AACR GENIE Results; KIT_p.L576P; A1101
VYIDPTQPPY

SEQ ID NO: 24794 - protein, 9 aa, Homo sapiens
  AACR GENIE Results; KMT2D_p.L3723_Q3724dup; B1501
QQQQQQVQL

SEQ ID NO: 24795 - protein, 10 aa, Homo sapiens
  AACR GENIE Results; KMT2D_p.R1918H; B5501
YPLEPHFPTA

SEQ ID NO: 24796 - protein, 11 aa, Homo sapiens
  AACR GENIE Results; KRAS_p.A146T; B2702
IPFIETSTKTR

SEQ ID NO: 24797 - protein, 10 aa, Homo sapiens
  AACR GENIE Results; KRAS_p.A146T; B2702
GIPFIETSTK

SEQ ID NO: 24798 - protein, 11 aa, Homo sapiens
  AACR GENIE Results; KRAS_p.A146T; A6801
IPFIETSTKTR

SEQ ID NO: 24799 - protein, 8 aa, Homo sapiens
  AACR GENIE Results; KRAS_p.A146T; B5502
IPFIETST

SEQ ID NO: 24800 - protein, 10 aa, Homo sapiens
  AACR GENIE Results; KRAS_p.A146T; B5502
IPFIETSTKT

SEQ ID NO: 24801 - protein, 9 aa, Homo sapiens
  AACR GENIE Results; KRAS_p.A146T; B5101
IPFIETSTK

SEQ ID NO: 24802 - protein, 8 aa, Homo sapiens
  AACR GENIE Results; KRAS_p.A146V; B5101
IPFIETSV

SEQ ID NO: 24803 - protein, 8 aa, Homo sapiens
  AACR GENIE Results; KRAS_p.A146V; B3906
IPFIETSV

SEQ ID NO: 24804 - protein, 8 aa, Homo sapiens
  AACR GENIE Results; KRAS_p.A146V; B5501
IPFIETSV

SEQ ID NO: 24805 - protein, 9 aa, Homo sapiens
  AACR GENIE Results; KRAS_p.A146V; A0206
GIPFIETSV

SEQ ID NO: 24806 - protein, 9 aa, Homo sapiens
  AACR GENIE Results; KRAS_p.A146V; B1302
GIPFIETSV

SEQ ID NO: 24807 - protein, 9 aa, Homo sapiens
  AACR GENIE Results; KRAS_p.A146V; A0205
GIPFIETSV

SEQ ID NO: 24808 - protein, 9 aa, Homo sapiens
  AACR GENIE Results; KRAS_p.A146V; A6801
FIETSVKTR

SEQ ID NO: 24809 - protein, 11 aa, Homo sapiens
  AACR GENIE Results; KRAS_p.A146V; A6801
IPFIETSVKTR

SEQ ID NO: 24810 - protein, 9 aa, Homo sapiens
  AACR GENIE Results; KRAS_p.A146V; A6802
GIPFIETSV

SEQ ID NO: 24811 - protein, 11 aa, Homo sapiens
  AACR GENIE Results; KRAS_p.A146V; B2702
IPFIETSVKTR

SEQ ID NO: 24812 - protein, 9 aa, Homo sapiens
  AACR GENIE Results; KRAS_p.A146V; A0201
GIPFIETSV

SEQ ID NO: 24813 - protein, 10 aa, Homo sapiens
  AACR GENIE Results; KRAS_p.A146V; B2702
GIPFIETSVK

SEQ ID NO: 24814 - protein, 10 aa, Homo sapiens
  AACR GENIE Results; KRAS_p.A59T; A0101
ILDTTGQEEY

SEQ ID NO: 24815 - protein, 10 aa, Homo sapiens
  AACR GENIE Results; KRAS_p.A59T; B5801
ILDTTGQEEY

SEQ ID NO: 24816 - protein, 10 aa, Homo sapiens
  AACR GENIE Results; KRAS_p.A59T; B1501
ILDTTGQEEY

SEQ ID NO: 24817 - protein, 9 aa, Homo sapiens
  AACR GENIE Results; KRAS_p.A59T; B3502
TGQEEYSAM

SEQ ID NO: 24818 - protein, 11 aa, Homo sapiens
  AACR GENIE Results; KRAS_p.A59T; B2702
DILDTTGQEEY

SEQ ID NO: 24819 - protein, 11 aa, Homo sapiens
  AACR GENIE Results; KRAS_p.A59T; A3301
DILDTTGQEEY

SEQ ID NO: 24820 - protein, 11 aa, Homo sapiens
  AACR GENIE Results; KRAS_p.A59T; B3501
DILDTTGQEEY

SEQ ID NO: 24821 - protein, 10 aa, Homo sapiens
  AACR GENIE Results; KRAS_p.A59T; B3901
ILDTTGQEEY

SEQ ID NO: 24822 - protein, 10 aa, Homo sapiens
  AACR GENIE Results; KRAS_p.A59T; A2902
ILDTTGQEEY

SEQ ID NO: 24823 - protein, 9 aa, Homo sapiens
  AACR GENIE Results; KRAS_p.A59T; B3503
TGQEEYSAM

SEQ ID NO: 24824 - protein, 9 aa, Homo sapiens
  AACR GENIE Results; KRAS_p.A59T; B3501
TGQEEYSAM

SEQ ID NO: 24825 - protein, 10 aa, Homo sapiens
  AACR GENIE Results; KRAS_p.A59T; B3501
ILDTTGQEEY

SEQ ID NO: 24826 - protein, 10 aa, Homo sapiens
  AACR GENIE Results; KRAS_p.A59T; B2702
ILDTTGQEEY

SEQ ID NO: 24827 - protein, 11 aa, Homo sapiens
  AACR GENIE Results; KRAS_p.A59T; A2601
DILDTTGQEEY

SEQ ID NO: 24828 - protein, 11 aa, Homo sapiens
  AACR GENIE Results; KRAS_p.A59T; A6801
TTGQEEYSAMR

SEQ ID NO: 24829 - protein, 9 aa, Homo sapiens
  AACR GENIE Results; KRAS_p.A59T; B3501
LDTTGQEEY

SEQ ID NO: 24830 - protein, 11 aa, Homo sapiens
  AACR GENIE Results; KRAS_p.A59T; A0101
DILDTTGQEEY

SEQ ID NO: 24831 - protein, 9 aa, Homo sapiens
  AACR GENIE Results; KRAS_p.A59T; A0101
LDTTGQEEY

SEQ ID NO: 24832 - protein, 11 aa, Homo sapiens
  AACR GENIE Results; KRAS_p.A59T; A6801
DILDTTGQEEY

SEQ ID NO: 24833 - protein, 9 aa, Homo sapiens
  AACR GENIE Results; KRAS_p.A59T; B1801
LDTTGQEEY

SEQ ID NO: 24834 - protein, 11 aa, Homo sapiens
  AACR GENIE Results; KRAS_p.A59T; B3901
DILDTTGQEEY

SEQ ID NO: 24835 - protein, 10 aa, Homo sapiens
  AACR GENIE Results; KRAS_p.A59T; B3801
ILDTTGQEEY

SEQ ID NO: 24836 - protein, 9 aa, Homo sapiens
  AACR GENIE Results; KRAS_p.A59T; B3901
TGQEEYSAM

SEQ ID NO: 24837 - protein, 11 aa, Homo sapiens
  AACR GENIE Results; KRAS_p.D33E; B1801
DEYEPTIEDSY

SEQ ID NO: 24838 - protein, 9 aa, Homo sapiens
  AACR GENIE Results; KRAS_p.D33E; C0802
FVDEYEPTI

SEQ ID NO: 24839 - protein, 9 aa, Homo sapiens
  AACR GENIE Results; KRAS_p.D33E; C0501
FVDEYEPTI

SEQ ID NO: 24840 - protein, 9 aa, Homo sapiens
  AACR GENIE Results; KRAS_p.D33E; B3801
FVDEYEPTI

SEQ ID NO: 24841 - protein, 9 aa, Homo sapiens
  AACR GENIE Results; KRAS_p.D33E; A0201
FVDEYEPTI

SEQ ID NO: 24842 - protein, 9 aa, Homo sapiens
  AACR GENIE Results; KRAS_p.D33E; B1801
YEPTIEDSY

SEQ ID NO: 24843 - protein, 9 aa, Homo sapiens
  AACR GENIE Results; KRAS_p.D33E; B5101
FVDEYEPTI

SEQ ID NO: 24844 - protein, 9 aa, Homo sapiens
  AACR GENIE Results; KRAS_p.D33E; B1302
FVDEYEPTI

SEQ ID NO: 24845 - protein, 8 aa, Homo sapiens
  AACR GENIE Results; KRAS_p.D33E; B3501
EPTIEDSY

SEQ ID NO: 24846 - protein, 11 aa, Homo sapiens
  AACR GENIE Results; KRAS_p.D33E; B4403
DEYEPTIEDSY

SEQ ID NO: 24847 - protein, 9 aa, Homo sapiens
  AACR GENIE Results; KRAS_p.D33E; B4403
YEPTIEDSY

SEQ ID NO: 24848 - protein, 9 aa, Homo sapiens
  AACR GENIE Results; KRAS_p.D33E; B3501
YEPTIEDSY

SEQ ID NO: 24849 - protein, 9 aa, Homo sapiens
  AACR GENIE Results; KRAS_p.D33E; A2902
YEPTIEDSY

SEQ ID NO: 24850 - protein, 9 aa, Homo sapiens
  AACR GENIE Results; KRAS_p.D33E; B1501
YEPTIEDSY

SEQ ID NO: 24851 - protein, 9 aa, Homo sapiens
  AACR GENIE Results; KRAS_p.D33E; A2301
YEPTIEDSY

SEQ ID NO: 24852 - protein, 9 aa, Homo sapiens
  AACR GENIE Results; KRAS_p.D33E; B3501
FVDEYEPTI

SEQ ID NO: 24853 - protein, 9 aa, Homo sapiens
  AACR GENIE Results; KRAS_p.G12A; A0302
VVGAAGVGK

SEQ ID NO: 24854 - protein, 10 aa, Homo sapiens
  AACR GENIE Results; KRAS_p.G12A; A1101
VVVGAAGVGK

SEQ ID NO: 24855 - protein, 10 aa, Homo sapiens
  AACR GENIE Results; KRAS_p.G12A; A0302
VVVGAAGVGK

SEQ ID NO: 24856 - protein, 9 aa, Homo sapiens
  AACR GENIE Results; KRAS_p.G12A; A1101
VVGAAGVGK

SEQ ID NO: 24857 - protein, 10 aa, Homo sapiens
  AACR GENIE Results; KRAS_p.G12A; A0301
VVVGAAGVGK

SEQ ID NO: 24858 - protein, 9 aa, Homo sapiens
  AACR GENIE Results; KRAS_p.G12A; A0301
VVGAAGVGK

SEQ ID NO: 24859 - protein, 10 aa, Homo sapiens
  AACR GENIE Results; KRAS_p.G12A; A6801
VVVGAAGVGK

SEQ ID NO: 24860 - protein, 11 aa, Homo sapiens
  AACR GENIE Results; KRAS_p.G12A; B2702
LVVVGAAGVGK

SEQ ID NO: 24861 - protein, 9 aa, Homo sapiens
  AACR GENIE Results; KRAS_p.G12A; B0702
AAGVGKSAL

SEQ ID NO: 24862 - protein, 9 aa, Homo sapiens
  AACR GENIE Results; KRAS_p.G12A; C0102
AAGVGKSAL

SEQ ID NO: 24863 - protein, 10 aa, Homo sapiens
  AACR GENIE Results; KRAS_p.G12A; B4801
GAAGVGKSAL

SEQ ID NO: 24864 - protein, 11 aa, Homo sapiens
  AACR GENIE Results; KRAS_p.G12A; A0302
LVVVGAAGVGK

SEQ ID NO: 24865 - protein, 10 aa, Homo sapiens
  AACR GENIE Results; KRAS_p.G12A; B1302
AGVGKSALTI

SEQ ID NO: 24866 - protein, 9 aa, Homo sapiens
  AACR GENIE Results; KRAS_p.G12A; A0206
LVVVGAAGV

SEQ ID NO: 24867 - protein, 11 aa, Homo sapiens
  AACR GENIE Results; KRAS_p.G12A; A1101
LVVVGAAGVGK

SEQ ID NO: 24868 - protein, 8 aa, Homo sapiens
  AACR GENIE Results; KRAS_p.G12A; B0801
AGVGKSAL

SEQ ID NO: 24869 - protein, 10 aa, Homo sapiens
  AACR GENIE Results; KRAS_p.G12A; B0702
GAAGVGKSAL

SEQ ID NO: 24870 - protein, 11 aa, Homo sapiens
  AACR GENIE Results; KRAS_p.G12A; A6801
LVVVGAAGVGK

SEQ ID NO: 24871 - protein, 10 aa, Homo sapiens
  AACR GENIE Results; KRAS_p.G12A; B4001
GAAGVGKSAL

SEQ ID NO: 24872 - protein, 11 aa, Homo sapiens
  AACR GENIE Results; KRAS_p.G12A; B5001
TEYKLVVVGAA

SEQ ID NO: 24873 - protein, 10 aa, Homo sapiens
  AACR GENIE Results; KRAS_p.G12A; B2702
VVVGAAGVGK

SEQ ID NO: 24874 - protein, 11 aa, Homo sapiens
  AACR GENIE Results; KRAS_p.G12A; A0301
LVVVGAAGVGK

SEQ ID NO: 24875 - protein, 9 aa, Homo sapiens
  AACR GENIE Results; KRAS_p.G12A; A6801
VVGAAGVGK

SEQ ID NO: 24876 - protein, 11 aa, Homo sapiens
  AACR GENIE Results; KRAS_p.G12A; B0801
VGAAGVGKSAL

SEQ ID NO: 24877 - protein, 10 aa, Homo sapiens
  AACR GENIE Results; KRAS_p.G12A; B1501
GAAGVGKSAL

SEQ ID NO: 24878 - protein, 11 aa, Homo sapiens
  AACR GENIE Results; KRAS_p.G12A; C0704
VVVGAAGVGKS

SEQ ID NO: 24879 - protein, 10 aa, Homo sapiens
  AACR GENIE Results; KRAS_p.G12A; C0304
GAAGVGKSAL

SEQ ID NO: 24880 - protein, 8 aa, Homo sapiens
  AACR GENIE Results; KRAS_p.G12A; B4102
AGVGKSAL

SEQ ID NO: 24881 - protein, 9 aa, Homo sapiens
  AACR GENIE Results; KRAS_p.G12A; C0304
GAAGVGKSA

SEQ ID NO: 24882 - protein, 9 aa, Homo sapiens
  AACR GENIE Results; KRAS_p.G12A; C0304
AAGVGKSAL

SEQ ID NO: 24883 - protein, 11 aa, Homo sapiens
  AACR GENIE Results; KRAS_p.G12A; A2601
VVVGAAGVGKS

SEQ ID NO: 24884 - protein, 9 aa, Homo sapiens
  AACR GENIE Results; KRAS_p.G12A; B3906
YKLVVVGAA

SEQ ID NO: 24885 - protein, 10 aa, Homo sapiens
  AACR GENIE Results; KRAS_p.G12A; A3001
VVVGAAGVGK

SEQ ID NO: 24886 - protein, 10 aa, Homo sapiens
  AACR GENIE Results; KRAS_p.G12A; A0203
KLVVVGAAGV

SEQ ID NO: 24887 - protein, 11 aa, Homo sapiens
  AACR GENIE Results; KRAS_p.G12A; A1101
VVVGAAGVGKS

SEQ ID NO: 24888 - protein, 11 aa, Homo sapiens
  AACR GENIE Results; KRAS_p.G12A; A0206
VVVGAAGVGKS

SEQ ID NO: 24889 - protein, 9 aa, Homo sapiens
  AACR GENIE Results; KRAS_p.G12A; C0801
AAGVGKSAL

SEQ ID NO: 24890 - protein, 8 aa, Homo sapiens
  AACR GENIE Results; KRAS_p.G12A; B0702
AGVGKSAL

SEQ ID NO: 24891 - protein, 8 aa, Homo sapiens
  AACR GENIE Results; KRAS_p.G12A; B1302
VVVGAAGV

SEQ ID NO: 24892 - protein, 9 aa, Homo sapiens
  AACR GENIE Results; KRAS_p.G12A; B0801
AAGVGKSAL

SEQ ID NO: 24893 - protein, 9 aa, Homo sapiens
  AACR GENIE Results; KRAS_p.G12A; A0205
LVVVGAAGV

SEQ ID NO: 24894 - protein, 10 aa, Homo sapiens
  AACR GENIE Results; KRAS_p.G12A; A0201
KLVVVGAAGV

SEQ ID NO: 24895 - protein, 11 aa, Homo sapiens
  AACR GENIE Results; KRAS_p.G12A; B4801
VVVGAAGVGKS

SEQ ID NO: 24896 - protein, 10 aa, Homo sapiens
  AACR GENIE Results; KRAS_p.G12A; C0102
GAAGVGKSAL

SEQ ID NO: 24897 - protein, 9 aa, Homo sapiens
  AACR GENIE Results; KRAS_p.G12A; C1601
AAGVGKSAL

SEQ ID NO: 24898 - protein, 9 aa, Homo sapiens
  AACR GENIE Results; KRAS_p.G12A; B2702
VVGAAGVGK

SEQ ID NO: 24899 - protein, 10 aa, Homo sapiens
  AACR GENIE Results; KRAS_p.G12C; A1101
VVVGACGVGK

SEQ ID NO: 24900 - protein, 9 aa, Homo sapiens
  AACR GENIE Results; KRAS_p.G12C; A0302
VVGACGVGK

SEQ ID NO: 24901 - protein, 10 aa, Homo sapiens
  AACR GENIE Results; KRAS_p.G12C; A0302
VVVGACGVGK

SEQ ID NO: 24902 - protein, 9 aa, Homo sapiens
  AACR GENIE Results; KRAS_p.G12C; A1101
VVGACGVGK

SEQ ID NO: 24903 - protein, 10 aa, Homo sapiens
  AACR GENIE Results; KRAS_p.G12C; A0301
VVVGACGVGK

SEQ ID NO: 24904 - protein, 9 aa, Homo sapiens
  AACR GENIE Results; KRAS_p.G12C; A0301
VVGACGVGK

SEQ ID NO: 24905 - protein, 10 aa, Homo sapiens
  AACR GENIE Results; KRAS_p.G12C; A6801
VVVGACGVGK

SEQ ID NO: 24906 - protein, 9 aa, Homo sapiens
  AACR GENIE Results; KRAS_p.G12C; C0102
ACGVGKSAL

SEQ ID NO: 24907 - protein, 11 aa, Homo sapiens
  AACR GENIE Results; KRAS_p.G12C; A0302
LVVVGACGVGK

SEQ ID NO: 24908 - protein, 9 aa, Homo sapiens
  AACR GENIE Results; KRAS_p.G12C; A0206
LVVVGACGV

SEQ ID NO: 24909 - protein, 9 aa, Homo sapiens
  AACR GENIE Results; KRAS_p.G12C; B0702
ACGVGKSAL

SEQ ID NO: 24910 - protein, 10 aa, Homo sapiens
  AACR GENIE Results; KRAS_p.G12C; B2702
VVVGACGVGK

SEQ ID NO: 24911 - protein, 10 aa, Homo sapiens
  AACR GENIE Results; KRAS_p.G12C; B0702
GACGVGKSAL

SEQ ID NO: 24912 - protein, 8 aa, Homo sapiens
  AACR GENIE Results; KRAS_p.G12C; B0801
CGVGKSAL

SEQ ID NO: 24913 - protein, 8 aa, Homo sapiens
  AACR GENIE Results; KRAS_p.G12D; B1402
DGVGKSAL

SEQ ID NO: 24914 - protein, 10 aa, Homo sapiens
  AACR GENIE Results; KRAS_p.G12D; A1101
VVVGADGVGK

SEQ ID NO: 24915 - protein, 10 aa, Homo sapiens
  AACR GENIE Results; KRAS_p.G12D; A0302
VVVGADGVGK

SEQ ID NO: 24916 - protein, 10 aa, Homo sapiens
  AACR GENIE Results; KRAS_p.G12D; C0802
GADGVGKSAL

SEQ ID NO: 24917 - protein, 8 aa, Homo sapiens
  AACR GENIE Results; KRAS_p.G12D; B0801
DGVGKSAL

SEQ ID NO: 24918 - protein, 9 aa, Homo sapiens
  AACR GENIE Results; KRAS_p.G12D; A0302
VVGADGVGK

SEQ ID NO: 24919 - protein, 11 aa, Homo sapiens
  AACR GENIE Results; KRAS_p.G12D; B2702
LVVVGADGVGK

SEQ ID NO: 24920 - protein, 9 aa, Homo sapiens
  AACR GENIE Results; KRAS_p.G12D; A1101
VVGADGVGK

SEQ ID NO: 24921 - protein, 10 aa, Homo sapiens
  AACR GENIE Results; KRAS_p.G12D; A6801
VVVGADGVGK

SEQ ID NO: 24922 - protein, 11 aa, Homo sapiens
  AACR GENIE Results; KRAS_p.G12D; B4801
VVVGADGVGKS

SEQ ID NO: 24923 - protein, 8 aa, Homo sapiens
  AACR GENIE Results; KRAS_p.G12D; B1401
DGVGKSAL

SEQ ID NO: 24924 - protein, 9 aa, Homo sapiens
  AACR GENIE Results; KRAS_p.G12D; B3701
ADGVGKSAL

SEQ ID NO: 24925 - protein, 9 aa, Homo sapiens
  AACR GENIE Results; KRAS_p.G12D; B0702
ADGVGKSAL

SEQ ID NO: 24926 - protein, 11 aa, Homo sapiens
  AACR GENIE Results; KRAS_p.G12D; C0803
VVVGADGVGKS

SEQ ID NO: 24927 - protein, 10 aa, Homo sapiens
  AACR GENIE Results; KRAS_p.G12D; B5101
DGVGKSALTI

SEQ ID NO: 24928 - protein, 9 aa, Homo sapiens
  AACR GENIE Results; KRAS_p.G12D; B4102
ADGVGKSAL

SEQ ID NO: 24929 - protein, 10 aa, Homo sapiens
  AACR GENIE Results; KRAS_p.G12D; B4001
GADGVGKSAL

SEQ ID NO: 24930 - protein, 11 aa, Homo sapiens
  AACR GENIE Results; KRAS_p.G12D; B0801
VGADGVGKSAL

SEQ ID NO: 24931 - protein, 10 aa, Homo sapiens
  AACR GENIE Results; KRAS_p.G12D; B3502
GADGVGKSAL

SEQ ID NO: 24932 - protein, 10 aa, Homo sapiens
  AACR GENIE Results; KRAS_p.G12D; B1513
GADGVGKSAL

SEQ ID NO: 24933 - protein, 10 aa, Homo sapiens
  AACR GENIE Results; KRAS_p.G12D; B2702
VVVGADGVGK

SEQ ID NO: 24934 - protein, 9 aa, Homo sapiens
  AACR GENIE Results; KRAS_p.G12D; A0206
LVVVGADGV

SEQ ID NO: 24935 - protein, 11 aa, Homo sapiens
  AACR GENIE Results; KRAS_p.G12D; A0302
LVVVGADGVGK

SEQ ID NO: 24936 - protein, 10 aa, Homo sapiens
  AACR GENIE Results; KRAS_p.G12D; B4801
GADGVGKSAL

SEQ ID NO: 24937 - protein, 9 aa, Homo sapiens
  AACR GENIE Results; KRAS_p.G12D; B4002
ADGVGKSAL

SEQ ID NO: 24938 - protein, 10 aa, Homo sapiens
  AACR GENIE Results; KRAS_p.G12D; A0301
VVVGADGVGK

SEQ ID NO: 24939 - protein, 10 aa, Homo sapiens
  AACR GENIE Results; KRAS_p.G12D; C0501
GADGVGKSAL

SEQ ID NO: 24940 - protein, 10 aa, Homo sapiens
  AACR GENIE Results; KRAS_p.G12D; B0702
GADGVGKSAL

SEQ ID NO: 24941 - protein, 10 aa, Homo sapiens
  AACR GENIE Results; KRAS_p.G12D; B1301
GADGVGKSAL

SEQ ID NO: 24942 - protein, 10 aa, Homo sapiens
  AACR GENIE Results; KRAS_p.G12D; C0801
GADGVGKSAL

SEQ ID NO: 24943 - protein, 11 aa, Homo sapiens
  AACR GENIE Results; KRAS_p.G12D; A0206
VVVGADGVGKS

SEQ ID NO: 24944 - protein, 10 aa, Homo sapiens
  AACR GENIE Results; KRAS_p.G12D; C0803
VVGADGVGKS

SEQ ID NO: 24945 - protein, 9 aa, Homo sapiens
  AACR GENIE Results; KRAS_p.G12D; B4405
ADGVGKSAL

SEQ ID NO: 24946 - protein, 10 aa, Homo sapiens
  AACR GENIE Results; KRAS_p.G12D; A2603
VVVGADGVGK

SEQ ID NO: 24947 - protein, 11 aa, Homo sapiens
  AACR GENIE Results; KRAS_p.G12D; A1101
LVVVGADGVGK

SEQ ID NO: 24948 - protein, 9 aa, Homo sapiens
  AACR GENIE Results; KRAS_p.G12D; A0205
LVVVGADGV

SEQ ID NO: 24949 - protein, 10 aa, Homo sapiens
  AACR GENIE Results; KRAS_p.G12D; A0206
KLVVVGADGV

SEQ ID NO: 24950 - protein, 10 aa, Homo sapiens
  AACR GENIE Results; KRAS_p.G12D; A0201
KLVVVGADGV

SEQ ID NO: 24951 - protein, 10 aa, Homo sapiens
  AACR GENIE Results; KRAS_p.G12D; C0102
GADGVGKSAL

SEQ ID NO: 24952 - protein, 10 aa, Homo sapiens
  AACR GENIE Results; KRAS_p.G12D; B1302
KLVVVGADGV

SEQ ID NO: 24953 - protein, 11 aa, Homo sapiens
  AACR GENIE Results; KRAS_p.G12D; B3901
VGADGVGKSAL

SEQ ID NO: 24954 - protein, 11 aa, Homo sapiens
  AACR GENIE Results; KRAS_p.G12D; A2601
VVVGADGVGKS

SEQ ID NO: 24955 - protein, 10 aa, Homo sapiens
  AACR GENIE Results; KRAS_p.G12D; A0204
KLVVVGADGV

SEQ ID NO: 24956 - protein, 10 aa, Homo sapiens
  AACR GENIE Results; KRAS_p.G12D; B4801
VVVGADGVGK

SEQ ID NO: 24957 - protein, 10 aa, Homo sapiens
  AACR GENIE Results; KRAS_p.G12D; B3503
GADGVGKSAL

SEQ ID NO: 24958 - protein, 9 aa, Homo sapiens
  AACR GENIE Results; KRAS_p.G12F; A1101
VVGAFGVGK

SEQ ID NO: 24959 - protein, 10 aa, Homo sapiens
  AACR GENIE Results; KRAS_p.G12F; A1101
VVVGAFGVGK

SEQ ID NO: 24960 - protein, 9 aa, Homo sapiens
  AACR GENIE Results; KRAS_p.G12F; A0301
VVGAFGVGK

SEQ ID NO: 24961 - protein, 9 aa, Homo sapiens
  AACR GENIE Results; KRAS_p.G12F; C1402
AFGVGKSAL

SEQ ID NO: 24962 - protein, 8 aa, Homo sapiens
  AACR GENIE Results; KRAS_p.G12F; B0801
FGVGKSAL

SEQ ID NO: 24963 - protein, 10 aa, Homo sapiens
  AACR GENIE Results; KRAS_p.G12F; C0304
GAFGVGKSAL

SEQ ID NO: 24964 - protein, 11 aa, Homo sapiens
  AACR GENIE Results; KRAS_p.G12F; B2702
LVVVGAFGVGK

SEQ ID NO: 24965 - protein, 10 aa, Homo sapiens
  AACR GENIE Results; KRAS_p.G12F; A0301
VVVGAFGVGK

SEQ ID NO: 24966 - protein, 8 aa, Homo sapiens
  AACR GENIE Results; KRAS_p.G12F; B1402
FGVGKSAL

SEQ ID NO: 24967 - protein, 9 aa, Homo sapiens
  AACR GENIE Results; KRAS_p.G12F; B2702
VVGAFGVGK

SEQ ID NO: 24968 - protein, 10 aa, Homo sapiens
  AACR GENIE Results; KRAS_p.G12F; A6801
VVVGAFGVGK

SEQ ID NO: 24969 - protein, 9 aa, Homo sapiens
  AACR GENIE Results; KRAS_p.G12F; C0102
AFGVGKSAL

SEQ ID NO: 24970 - protein, 10 aa, Homo sapiens
  AACR GENIE Results; KRAS_p.G12F; B2702
VVVGAFGVGK

SEQ ID NO: 24971 - protein, 10 aa, Homo sapiens
  AACR GENIE Results; KRAS_p.G12F; C0303
GAFGVGKSAL

SEQ ID NO: 24972 - protein, 10 aa, Homo sapiens
  AACR GENIE Results; KRAS_p.G12F; B1501
GAFGVGKSAL

SEQ ID NO: 24973 - protein, 10 aa, Homo sapiens
  AACR GENIE Results; KRAS_p.G12F; B4001
GAFGVGKSAL

SEQ ID NO: 24974 - protein, 9 aa, Homo sapiens
  AACR GENIE Results; KRAS_p.G12F; A6801
VVGAFGVGK

SEQ ID NO: 24975 - protein, 11 aa, Homo sapiens
  AACR GENIE Results; KRAS_p.G12F; B0801
VGAFGVGKSAL

SEQ ID NO: 24976 - protein, 9 aa, Homo sapiens
  AACR GENIE Results; KRAS_p.G12F; B0702
AFGVGKSAL

SEQ ID NO: 24977 - protein, 8 aa, Homo sapiens
  AACR GENIE Results; KRAS_p.G12F; B1302
VVVGAFGV

SEQ ID NO: 24978 - protein, 10 aa, Homo sapiens
  AACR GENIE Results; KRAS_p.G12F; B0702
GAFGVGKSAL

SEQ ID NO: 24979 - protein, 10 aa, Homo sapiens
  AACR GENIE Results; KRAS_p.G12F; B4002
GAFGVGKSAL

SEQ ID NO: 24980 - protein, 8 aa, Homo sapiens
  AACR GENIE Results; KRAS_p.G12F; B1501
KLVVVGAF

SEQ ID NO: 24981 - protein, 10 aa, Homo sapiens
  AACR GENIE Results; KRAS_p.G12F; B5801
GAFGVGKSAL

SEQ ID NO: 24982 - protein, 10 aa, Homo sapiens
  AACR GENIE Results; KRAS_p.G12F; B5001
GAFGVGKSAL

SEQ ID NO: 24983 - protein, 8 aa, Homo sapiens
  AACR GENIE Results; KRAS_p.G12F; A1101
VGAFGVGK

SEQ ID NO: 24984 - protein, 10 aa, Homo sapiens
  AACR GENIE Results; KRAS_p.G12F; C0102
GAFGVGKSAL

SEQ ID NO: 24985 - protein, 8 aa, Homo sapiens
  AACR GENIE Results; KRAS_p.G12F; C0304
FGVGKSAL

SEQ ID NO: 24986 - protein, 10 aa, Homo sapiens
  AACR GENIE Results; KRAS_p.G12F; A3001
VVVGAFGVGK

SEQ ID NO: 24987 - protein, 10 aa, Homo sapiens
  AACR GENIE Results; KRAS_p.G12F; B1402
GAFGVGKSAL

SEQ ID NO: 24988 - protein, 9 aa, Homo sapiens
  AACR GENIE Results; KRAS_p.G12F; A3101
VVGAFGVGK

SEQ ID NO: 24989 - protein, 10 aa, Homo sapiens
  AACR GENIE Results; KRAS_p.G12F; A3001
GAFGVGKSAL

SEQ ID NO: 24990 - protein, 10 aa, Homo sapiens
  AACR GENIE Results; KRAS_p.G12F; A6802
VVVGAFGVGK

SEQ ID NO: 24991 - protein, 9 aa, Homo sapiens
  AACR GENIE Results; KRAS_p.G12F; B5001
GAFGVGKSA

SEQ ID NO: 24992 - protein, 9 aa, Homo sapiens
  AACR GENIE Results; KRAS_p.G12I; A1101
VVGAIGVGK

SEQ ID NO: 24993 - protein, 10 aa, Homo sapiens
  AACR GENIE Results; KRAS_p.G12I; A1101
VVVGAIGVGK

SEQ ID NO: 24994 - protein, 9 aa, Homo sapiens
  AACR GENIE Results; KRAS_p.G12I; A0301
VVGAIGVGK

SEQ ID NO: 24995 - protein, 10 aa, Homo sapiens
  AACR GENIE Results; KRAS_p.G12I; A0301
VVVGAIGVGK

SEQ ID NO: 24996 - protein, 10 aa, Homo sapiens
  AACR GENIE Results; KRAS_p.G12I; C0304
GAIGVGKSAL

SEQ ID NO: 24997 - protein, 9 aa, Homo sapiens
  AACR GENIE Results; KRAS_p.G12I; B0702
AIGVGKSAL

SEQ ID NO: 24998 - protein, 8 aa, Homo sapiens
  AACR GENIE Results; KRAS_p.G12I; B0801
IGVGKSAL

SEQ ID NO: 24999 - protein, 10 aa, Homo sapiens
  AACR GENIE Results; KRAS_p.G12I; A0201
KLVVVGAIGV

SEQ ID NO: 25000 - protein, 11 aa, Homo sapiens
  AACR GENIE Results; KRAS_p.G12I; B0801
VGAIGVGKSAL

SEQ ID NO: 25001 - protein, 10 aa, Homo sapiens
  AACR GENIE Results; KRAS_p.G12I; B0702
GAIGVGKSAL

SEQ ID NO: 25002 - protein, 9 aa, Homo sapiens
  AACR GENIE Results; KRAS_p.G12I; C0304
GAIGVGKSA

SEQ ID NO: 25003 - protein, 11 aa, Homo sapiens
  AACR GENIE Results; KRAS_p.G12I; A1101
LVVVGAIGVGK

SEQ ID NO: 25004 - protein, 11 aa, Homo sapiens
  AACR GENIE Results; KRAS_p.G12I; A0301
LVVVGAIGVGK

SEQ ID NO: 25005 - protein, 8 aa, Homo sapiens
  AACR GENIE Results; KRAS_p.G12I; B0702
IGVGKSAL

SEQ ID NO: 25006 - protein, 9 aa, Homo sapiens
  AACR GENIE Results; KRAS_p.G12I; B0801
AIGVGKSAL

SEQ ID NO: 25007 - protein, 10 aa, Homo sapiens
  AACR GENIE Results; KRAS_p.G12L; A1101
VVVGALGVGK

SEQ ID NO: 25008 - protein, 9 aa, Homo sapiens
  AACR GENIE Results; KRAS_p.G12L; A1101
VVGALGVGK

SEQ ID NO: 25009 - protein, 10 aa, Homo sapiens
  AACR GENIE Results; KRAS_p.G12L; A6801
VVVGALGVGK

SEQ ID NO: 25010 - protein, 10 aa, Homo sapiens
  AACR GENIE Results; KRAS_p.G12L; A0301
VVVGALGVGK

SEQ ID NO: 25011 - protein, 9 aa, Homo sapiens
  AACR GENIE Results; KRAS_p.G12L; A0301
VVGALGVGK

SEQ ID NO: 25012 - protein, 9 aa, Homo sapiens
  AACR GENIE Results; KRAS_p.G12L; C0102
ALGVGKSAL

SEQ ID NO: 25013 - protein, 10 aa, Homo sapiens
  AACR GENIE Results; KRAS_p.G12L; B4001
GALGVGKSAL

SEQ ID NO: 25014 - protein, 8 aa, Homo sapiens
  AACR GENIE Results; KRAS_p.G12L; B0801
LGVGKSAL

SEQ ID NO: 25015 - protein, 8 aa, Homo sapiens
  AACR GENIE Results; KRAS_p.G12L; B1402
LGVGKSAL

SEQ ID NO: 25016 - protein, 9 aa, Homo sapiens
  AACR GENIE Results; KRAS_p.G12L; B0702
ALGVGKSAL

SEQ ID NO: 25017 - protein, 9 aa, Homo sapiens
  AACR GENIE Results; KRAS_p.G12L; A6801
VVGALGVGK

SEQ ID NO: 25018 - protein, 10 aa, Homo sapiens
  AACR GENIE Results; KRAS_p.G12L; C0304
GALGVGKSAL

SEQ ID NO: 25019 - protein, 8 aa, Homo sapiens
  AACR GENIE Results; KRAS_p.G12L; B1302
VVVGALGV

SEQ ID NO: 25020 - protein, 9 aa, Homo sapiens
  AACR GENIE Results; KRAS_p.G12L; B0801
ALGVGKSAL

SEQ ID NO: 25021 - protein, 11 aa, Homo sapiens
  AACR GENIE Results; KRAS_p.G12L; A6801
VVVGALGVGKS

SEQ ID NO: 25022 - protein, 10 aa, Homo sapiens
  AACR GENIE Results; KRAS_p.G12L; B0702
GALGVGKSAL

SEQ ID NO: 25023 - protein, 11 aa, Homo sapiens
  AACR GENIE Results; KRAS_p.G12L; B0801
VGALGVGKSAL

SEQ ID NO: 25024 - protein, 11 aa, Homo sapiens
  AACR GENIE Results; KRAS_p.G12L; A1101
LVVVGALGVGK

SEQ ID NO: 25025 - protein, 8 aa, Homo sapiens
  AACR GENIE Results; KRAS_p.G12L; B1501
KLVVVGAL

SEQ ID NO: 25026 - protein, 9 aa, Homo sapiens
  AACR GENIE Results; KRAS_p.G12L; B1501
ALGVGKSAL

SEQ ID NO: 25027 - protein, 10 aa, Homo sapiens
  AACR GENIE Results; KRAS_p.G12L; A3001
VVVGALGVGK

SEQ ID NO: 25028 - protein, 11 aa, Homo sapiens
  AACR GENIE Results; KRAS_p.G12L; A6801
LVVVGALGVGK

SEQ ID NO: 25029 - protein, 10 aa, Homo sapiens
  AACR GENIE Results; KRAS_p.G12L; C0303
GALGVGKSAL

SEQ ID NO: 25030 - protein, 10 aa, Homo sapiens
  AACR GENIE Results; KRAS_p.G12R; A1101
VVVGARGVGK

SEQ ID NO: 25031 - protein, 10 aa, Homo sapiens
  AACR GENIE Results; KRAS_p.G12R; A0302
VVVGARGVGK

SEQ ID NO: 25032 - protein, 10 aa, Homo sapiens
  AACR GENIE Results; KRAS_p.G12R; A0301
VVVGARGVGK

SEQ ID NO: 25033 - protein, 10 aa, Homo sapiens
  AACR GENIE Results; KRAS_p.G12R; B0702
GARGVGKSAL

SEQ ID NO: 25034 - protein, 9 aa, Homo sapiens
  AACR GENIE Results; KRAS_p.G12R; A0302
VVGARGVGK

SEQ ID NO: 25035 - protein, 10 aa, Homo sapiens
  AACR GENIE Results; KRAS_p.G12R; A3303
EYKLVVVGAR

SEQ ID NO: 25036 - protein, 9 aa, Homo sapiens
  AACR GENIE Results; KRAS_p.G12R; A0301
VVGARGVGK

SEQ ID NO: 25037 - protein, 9 aa, Homo sapiens
  AACR GENIE Results; KRAS_p.G12R; A1101
VVGARGVGK

SEQ ID NO: 25038 - protein, 9 aa, Homo sapiens
  AACR GENIE Results; KRAS_p.G12R; B1401
ARGVGKSAL

SEQ ID NO: 25039 - protein, 10 aa, Homo sapiens
  AACR GENIE Results; KRAS_p.G12R; A6801
VVVGARGVGK

SEQ ID NO: 25040 - protein, 11 aa, Homo sapiens
  AACR GENIE Results; KRAS_p.G12R; B4801
VVVGARGVGKS

SEQ ID NO: 25041 - protein, 10 aa, Homo sapiens
  AACR GENIE Results; KRAS_p.G12R; A0203
KLVVVGARGV

SEQ ID NO: 25042 - protein, 8 aa, Homo sapiens
  AACR GENIE Results; KRAS_p.G12R; B0801
RGVGKSAL

SEQ ID NO: 25043 - protein, 10 aa, Homo sapiens
  AACR GENIE Results; KRAS_p.G12S; A1101
VVVGASGVGK

SEQ ID NO: 25044 - protein, 9 aa, Homo sapiens
  AACR GENIE Results; KRAS_p.G12S; A1101
VVGASGVGK

SEQ ID NO: 25045 - protein, 10 aa, Homo sapiens
  AACR GENIE Results; KRAS_p.G12S; A0301
VVVGASGVGK

SEQ ID NO: 25046 - protein, 10 aa, Homo sapiens
  AACR GENIE Results; KRAS_p.G12S; A6801
VVVGASGVGK

SEQ ID NO: 25047 - protein, 9 aa, Homo sapiens
  AACR GENIE Results; KRAS_p.G12S; A0301
VVGASGVGK

SEQ ID NO: 25048 - protein, 11 aa, Homo sapiens
  AACR GENIE Results; KRAS_p.G12S; B2702
LVVVGASGVGK

SEQ ID NO: 25049 - protein, 11 aa, Homo sapiens
  AACR GENIE Results; KRAS_p.G12S; C0704
VVVGASGVGKS

SEQ ID NO: 25050 - protein, 8 aa, Homo sapiens
  AACR GENIE Results; KRAS_p.G12S; B0801
SGVGKSAL

SEQ ID NO: 25051 - protein, 9 aa, Homo sapiens
  AACR GENIE Results; KRAS_p.G12S; C0102
ASGVGKSAL

SEQ ID NO: 25052 - protein, 10 aa, Homo sapiens
  AACR GENIE Results; KRAS_p.G12S; B2702
VVVGASGVGK

SEQ ID NO: 25053 - protein, 10 aa, Homo sapiens
  AACR GENIE Results; KRAS_p.G12S; B0702
GASGVGKSAL

SEQ ID NO: 25054 - protein, 11 aa, Homo sapiens
  AACR GENIE Results; KRAS_p.G12S; B0801
VGASGVGKSAL

SEQ ID NO: 25055 - protein, 10 aa, Homo sapiens
  AACR GENIE Results; KRAS_p.G12S; B4001
GASGVGKSAL

SEQ ID NO: 25056 - protein, 11 aa, Homo sapiens
  AACR GENIE Results; KRAS_p.G12S; A6801
VVVGASGVGKS

SEQ ID NO: 25057 - protein, 11 aa, Homo sapiens
  AACR GENIE Results; KRAS_p.G12S; A1101
LVVVGASGVGK

SEQ ID NO: 25058 - protein, 9 aa, Homo sapiens
  AACR GENIE Results; KRAS_p.G12S; A0206
LVVVGASGV

SEQ ID NO: 25059 - protein, 11 aa, Homo sapiens
  AACR GENIE Results; KRAS_p.G12S; A1101
VVVGASGVGKS

SEQ ID NO: 25060 - protein, 10 aa, Homo sapiens
  AACR GENIE Results; KRAS_p.G12S; A0203
KLVVVGASGV

SEQ ID NO: 25061 - protein, 10 aa, Homo sapiens
  AACR GENIE Results; KRAS_p.G12S; A3001
VVVGASGVGK

SEQ ID NO: 25062 - protein, 8 aa, Homo sapiens
  AACR GENIE Results; KRAS_p.G12S; B1402
SGVGKSAL

SEQ ID NO: 25063 - protein, 11 aa, Homo sapiens
  AACR GENIE Results; KRAS_p.G12S; A0301
LVVVGASGVGK

SEQ ID NO: 25064 - protein, 11 aa, Homo sapiens
  AACR GENIE Results; KRAS_p.G12S; A6801
LVVVGASGVGK

SEQ ID NO: 25065 - protein, 9 aa, Homo sapiens
  AACR GENIE Results; KRAS_p.G12S; B0702
ASGVGKSAL

SEQ ID NO: 25066 - protein, 8 aa, Homo sapiens
  AACR GENIE Results; KRAS_p.G12S; B0702
SGVGKSAL

SEQ ID NO: 25067 - protein, 11 aa, Homo sapiens
  AACR GENIE Results; KRAS_p.G12S; A0205
VVVGASGVGKS

SEQ ID NO: 25068 - protein, 9 aa, Homo sapiens
  AACR GENIE Results; KRAS_p.G12S; C0304
GASGVGKSA

SEQ ID NO: 25069 - protein, 8 aa, Homo sapiens
  AACR GENIE Results; KRAS_p.G12S; B1302
VVVGASGV

SEQ ID NO: 25070 - protein, 10 aa, Homo sapiens
  AACR GENIE Results; KRAS_p.G12S; C0102
GASGVGKSAL

SEQ ID NO: 25071 - protein, 8 aa, Homo sapiens
  AACR GENIE Results; KRAS_p.G12S; B4102
SGVGKSAL

SEQ ID NO: 25072 - protein, 10 aa, Homo sapiens
  AACR GENIE Results; KRAS_p.G12S; B1302
SGVGKSALTI

SEQ ID NO: 25073 - protein, 11 aa, Homo sapiens
  AACR GENIE Results; KRAS_p.G12S; A2601
VVVGASGVGKS

SEQ ID NO: 25074 - protein, 10 aa, Homo sapiens
  AACR GENIE Results; KRAS_p.G12S; C0304
GASGVGKSAL

SEQ ID NO: 25075 - protein, 9 aa, Homo sapiens
  AACR GENIE Results; KRAS_p.G12S; A6801
VVGASGVGK

SEQ ID NO: 25076 - protein, 9 aa, Homo sapiens
  AACR GENIE Results; KRAS_p.G12V; A0302
VVGAVGVGK

SEQ ID NO: 25077 - protein, 9 aa, Homo sapiens
  AACR GENIE Results; KRAS_p.G12V; A1101
VVGAVGVGK

SEQ ID NO: 25078 - protein, 9 aa, Homo sapiens
  AACR GENIE Results; KRAS_p.G12V; A0301
VVGAVGVGK

SEQ ID NO: 25079 - protein, 10 aa, Homo sapiens
  AACR GENIE Results; KRAS_p.G12V; A0302
VVVGAVGVGK

SEQ ID NO: 25080 - protein, 10 aa, Homo sapiens
  AACR GENIE Results; KRAS_p.G12V; A1101
VVVGAVGVGK

SEQ ID NO: 25081 - protein, 10 aa, Homo sapiens
  AACR GENIE Results; KRAS_p.G12V; A6801
VVVGAVGVGK

SEQ ID NO: 25082 - protein, 9 aa, Homo sapiens
  AACR GENIE Results; KRAS_p.G12V; C0102
AVGVGKSAL

SEQ ID NO: 25083 - protein, 10 aa, Homo sapiens
  AACR GENIE Results; KRAS_p.G12V; A0301
VVVGAVGVGK

SEQ ID NO: 25084 - protein, 9 aa, Homo sapiens
  AACR GENIE Results; KRAS_p.G12V; A6801
VVGAVGVGK

SEQ ID NO: 25085 - protein, 11 aa, Homo sapiens
  AACR GENIE Results; KRAS_p.G12V; C0803
VVVGAVGVGKS

SEQ ID NO: 25086 - protein, 9 aa, Homo sapiens
  AACR GENIE Results; KRAS_p.G12V; B0702
AVGVGKSAL

SEQ ID NO: 25087 - protein, 9 aa, Homo sapiens
  AACR GENIE Results; KRAS_p.G12V; B2702
VVGAVGVGK

SEQ ID NO: 25088 - protein, 11 aa, Homo sapiens
  AACR GENIE Results; KRAS_p.G12V; B2702
LVVVGAVGVGK

SEQ ID NO: 25089 - protein, 8 aa, Homo sapiens
  AACR GENIE Results; KRAS_p.G12V; B0801
VGVGKSAL

SEQ ID NO: 25090 - protein, 10 aa, Homo sapiens
  AACR GENIE Results; KRAS_p.G12V; B2702
VVVGAVGVGK

SEQ ID NO: 25091 - protein, 10 aa, Homo sapiens
  AACR GENIE Results; KRAS_p.G12V; B4801
GAVGVGKSAL

SEQ ID NO: 25092 - protein, 11 aa, Homo sapiens
  AACR GENIE Results; KRAS_p.G12V; B0801
VGAVGVGKSAL

SEQ ID NO: 25093 - protein, 11 aa, Homo sapiens
  AACR GENIE Results; KRAS_p.G12V; C0704
VVVGAVGVGKS

SEQ ID NO: 25094 - protein, 10 aa, Homo sapiens
  AACR GENIE Results; KRAS_p.G12V; B4001
GAVGVGKSAL

SEQ ID NO: 25095 - protein, 10 aa, Homo sapiens
  AACR GENIE Results; KRAS_p.G12V; A2603
VVVGAVGVGK

SEQ ID NO: 25096 - protein, 10 aa, Homo sapiens
  AACR GENIE Results; KRAS_p.G12V; A0201
KLVVVGAVGV

SEQ ID NO: 25097 - protein, 10 aa, Homo sapiens
  AACR GENIE Results; KRAS_p.G12V; C0304
GAVGVGKSAL

SEQ ID NO: 25098 - protein, 10 aa, Homo sapiens
  AACR GENIE Results; KRAS_p.G12V; A0204
KLVVVGAVGV

SEQ ID NO: 25099 - protein, 9 aa, Homo sapiens
  AACR GENIE Results; KRAS_p.G12V; A0206
LVVVGAVGV

SEQ ID NO: 25100 - protein, 8 aa, Homo sapiens
  AACR GENIE Results; KRAS_p.G12V; B1402
VGVGKSAL

SEQ ID NO: 25101 - protein, 11 aa, Homo sapiens
  AACR GENIE Results; KRAS_p.G12V; A0302
LVVVGAVGVGK

SEQ ID NO: 25102 - protein, 10 aa, Homo sapiens
  AACR GENIE Results; KRAS_p.G12V; A0203
KLVVVGAVGV

SEQ ID NO: 25103 - protein, 8 aa, Homo sapiens
  AACR GENIE Results; KRAS_p.G12V; B1302
VVVGAVGV

SEQ ID NO: 25104 - protein, 8 aa, Homo sapiens
  AACR GENIE Results; KRAS_p.G12V; A0302
VGAVGVGK

SEQ ID NO: 25105 - protein, 9 aa, Homo sapiens
  AACR GENIE Results; KRAS_p.G12V; B1501
AVGVGKSAL

SEQ ID NO: 25106 - protein, 9 aa, Homo sapiens
  AACR GENIE Results; KRAS_p.G12V; B5601
GAVGVGKSA

SEQ ID NO: 25107 - protein, 10 aa, Homo sapiens
  AACR GENIE Results; KRAS_p.G12V; A6802
VVVGAVGVGK

SEQ ID NO: 25108 - protein, 9 aa, Homo sapiens
  AACR GENIE Results; KRAS_p.G12V; A3101
VVGAVGVGK

SEQ ID NO: 25109 - protein, 11 aa, Homo sapiens
  AACR GENIE Results; KRAS_p.G12V; A6801
LVVVGAVGVGK

SEQ ID NO: 25110 - protein, 10 aa, Homo sapiens
  AACR GENIE Results; KRAS_p.G12V; B1302
VGVGKSALTI

SEQ ID NO: 25111 - protein, 10 aa, Homo sapiens
  AACR GENIE Results; KRAS_p.G12V; B4002
GAVGVGKSAL

SEQ ID NO: 25112 - protein, 10 aa, Homo sapiens
  AACR GENIE Results; KRAS_p.G12V; A0206
KLVVVGAVGV

SEQ ID NO: 25113 - protein, 10 aa, Homo sapiens
  AACR GENIE Results; KRAS_p.G12V; C0303
GAVGVGKSAL

SEQ ID NO: 25114 - protein, 11 aa, Homo sapiens
  AACR GENIE Results; KRAS_p.G12V; A1101
LVVVGAVGVGK

SEQ ID NO: 25115 - protein, 9 aa, Homo sapiens
  AACR GENIE Results; KRAS_p.G12V; A3303
VVGAVGVGK

SEQ ID NO: 25116 - protein, 10 aa, Homo sapiens
  AACR GENIE Results; KRAS_p.G12V; C0803
VVGAVGVGKS

SEQ ID NO: 25117 - protein, 8 aa, Homo sapiens
  AACR GENIE Results; KRAS_p.G12V; A0206
VVVGAVGV

SEQ ID NO: 25118 - protein, 8 aa, Homo sapiens
  AACR GENIE Results; KRAS_p.G12V; B1302
KLVVVGAV

SEQ ID NO: 25119 - protein, 9 aa, Homo sapiens
  AACR GENIE Results; KRAS_p.G12V; B0801
AVGVGKSAL

SEQ ID NO: 25120 - protein, 10 aa, Homo sapiens
  AACR GENIE Results; KRAS_p.G12V; B0702
GAVGVGKSAL

SEQ ID NO: 25121 - protein, 11 aa, Homo sapiens
  AACR GENIE Results; KRAS_p.G12V; B4801
VVVGAVGVGKS

SEQ ID NO: 25122 - protein, 9 aa, Homo sapiens
  AACR GENIE Results; KRAS_p.G12V; A0205
LVVVGAVGV

SEQ ID NO: 25123 - protein, 11 aa, Homo sapiens
  AACR GENIE Results; KRAS_p.G12V; A2601
VVVGAVGVGKS

SEQ ID NO: 25124 - protein, 11 aa, Homo sapiens
  AACR GENIE Results; KRAS_p.G12V; A0206
VVVGAVGVGKS

SEQ ID NO: 25125 - protein, 9 aa, Homo sapiens
  AACR GENIE Results; KRAS_p.G12V; C0304
GAVGVGKSA

SEQ ID NO: 25126 - protein, 10 aa, Homo sapiens
  AACR GENIE Results; KRAS_p.G12V; A3101
VVVGAVGVGK

SEQ ID NO: 25127 - protein, 8 aa, Homo sapiens
  AACR GENIE Results; KRAS_p.G12V; B3906
VVVGAVGV

SEQ ID NO: 25128 - protein, 9 aa, Homo sapiens
  AACR GENIE Results; KRAS_p.G12V; A6802
LVVVGAVGV

SEQ ID NO: 25129 - protein, 9 aa, Homo sapiens
  AACR GENIE Results; KRAS_p.G12V; B5401
GAVGVGKSA

SEQ ID NO: 25130 - protein, 8 aa, Homo sapiens
  AACR GENIE Results; KRAS_p.G12V; A1101
VGAVGVGK

SEQ ID NO: 25131 - protein, 10 aa, Homo sapiens
  AACR GENIE Results; KRAS_p.G12V; C0801
GAVGVGKSAL

SEQ ID NO: 25132 - protein, 11 aa, Homo sapiens
  AACR GENIE Results; KRAS_p.G12V; A0301
LVVVGAVGVGK

SEQ ID NO: 25133 - protein, 8 aa, Homo sapiens
  AACR GENIE Results; KRAS_p.G12V; A0203
KLVVVGAV

SEQ ID NO: 25134 - protein, 10 aa, Homo sapiens
  AACR GENIE Results; KRAS_p.G12V; B1501
GAVGVGKSAL

SEQ ID NO: 25135 - protein, 11 aa, Homo sapiens
  AACR GENIE Results; KRAS_p.G12V; A6801
VVVGAVGVGKS

SEQ ID NO: 25136 - protein, 10 aa, Homo sapiens
  AACR GENIE Results; KRAS_p.G12V; A3001
VVVGAVGVGK

SEQ ID NO: 25137 - protein, 10 aa, Homo sapiens
  AACR GENIE Results; KRAS_p.G13C; A1101
VVVGAGCVGK

SEQ ID NO: 25138 - protein, 9 aa, Homo sapiens
  AACR GENIE Results; KRAS_p.G13C; A1101
VVGAGCVGK

SEQ ID NO: 25139 - protein, 10 aa, Homo sapiens
  AACR GENIE Results; KRAS_p.G13C; A6801
VVVGAGCVGK

SEQ ID NO: 25140 - protein, 10 aa, Homo sapiens
  AACR GENIE Results; KRAS_p.G13C; A0301
VVVGAGCVGK

SEQ ID NO: 25141 - protein, 10 aa, Homo sapiens
  AACR GENIE Results; KRAS_p.G13C; B1302
GCVGKSALTI

SEQ ID NO: 25142 - protein, 9 aa, Homo sapiens
  AACR GENIE Results; KRAS_p.G13C; B0801
AGCVGKSAL

SEQ ID NO: 25143 - protein, 10 aa, Homo sapiens
  AACR GENIE Results; KRAS_p.G13C; B2702
VVVGAGCVGK

SEQ ID NO: 25144 - protein, 9 aa, Homo sapiens
  AACR GENIE Results; KRAS_p.G13C; A0301
VVGAGCVGK

SEQ ID NO: 25145 - protein, 9 aa, Homo sapiens
  AACR GENIE Results; KRAS_p.G13C; B1302
CVGKSALTI

SEQ ID NO: 25146 - protein, 9 aa, Homo sapiens
  AACR GENIE Results; KRAS_p.G13C; B0702
AGCVGKSAL

SEQ ID NO: 25147 - protein, 9 aa, Homo sapiens
  AACR GENIE Results; KRAS_p.G13D; C0802
AGDVGKSAL

SEQ ID NO: 25148 - protein, 8 aa, Homo sapiens
  AACR GENIE Results; KRAS_p.G13D; B4102
GDVGKSAL

SEQ ID NO: 25149 - protein, 11 aa, Homo sapiens
  AACR GENIE Results; KRAS_p.G13D; C0803
VVVGAGDVGKS

SEQ ID NO: 25150 - protein, 9 aa, Homo sapiens
  AACR GENIE Results; KRAS_p.G13D; A0302
VVGAGDVGK

SEQ ID NO: 25151 - protein, 10 aa, Homo sapiens
  AACR GENIE Results; KRAS_p.G13D; A0302
VVVGAGDVGK

SEQ ID NO: 25152 - protein, 10 aa, Homo sapiens
  AACR GENIE Results; KRAS_p.G13D; A6801
VVVGAGDVGK

SEQ ID NO: 25153 - protein, 11 aa, Homo sapiens
  AACR GENIE Results; KRAS_p.G13D; C0704
VVVGAGDVGKS

SEQ ID NO: 25154 - protein, 11 aa, Homo sapiens
  AACR GENIE Results; KRAS_p.G13D; B2702
LVVVGAGDVGK

SEQ ID NO: 25155 - protein, 8 aa, Homo sapiens
  AACR GENIE Results; KRAS_p.G13D; B4002
GDVGKSAL

SEQ ID NO: 25156 - protein, 10 aa, Homo sapiens
  AACR GENIE Results; KRAS_p.G13D; A1101
VVVGAGDVGK

SEQ ID NO: 25157 - protein, 9 aa, Homo sapiens
  AACR GENIE Results; KRAS_p.G13D; B5101
DVGKSALTI

SEQ ID NO: 25158 - protein, 10 aa, Homo sapiens
  AACR GENIE Results; KRAS_p.G13D; B2702
VVVGAGDVGK

SEQ ID NO: 25159 - protein, 9 aa, Homo sapiens
  AACR GENIE Results; KRAS_p.G13D; A1101
VVGAGDVGK

SEQ ID NO: 25160 - protein, 9 aa, Homo sapiens
  AACR GENIE Results; KRAS_p.G13D; C0501
AGDVGKSAL

SEQ ID NO: 25161 - protein, 9 aa, Homo sapiens
  AACR GENIE Results; KRAS_p.G13D; B0702
AGDVGKSAL

SEQ ID NO: 25162 - protein, 9 aa, Homo sapiens
  AACR GENIE Results; KRAS_p.G13D; C0801
AGDVGKSAL

SEQ ID NO: 25163 - protein, 10 aa, Homo sapiens
  AACR GENIE Results; KRAS_p.G13D; C0803
VVGAGDVGKS

SEQ ID NO: 25164 - protein, 11 aa, Homo sapiens
  AACR GENIE Results; KRAS_p.G13D; A0302
LVVVGAGDVGK

SEQ ID NO: 25165 - protein, 10 aa, Homo sapiens
  AACR GENIE Results; KRAS_p.G13D; B4002
GDVGKSALTI

SEQ ID NO: 25166 - protein, 8 aa, Homo sapiens
  AACR GENIE Results; KRAS_p.G13D; B0702
GDVGKSAL

SEQ ID NO: 25167 - protein, 11 aa, Homo sapiens
  AACR GENIE Results; KRAS_p.G13D; A6801
LVVVGAGDVGK

SEQ ID NO: 25168 - protein, 10 aa, Homo sapiens
  AACR GENIE Results; KRAS_p.G13D; B1302
GDVGKSALTI

SEQ ID NO: 25169 - protein, 9 aa, Homo sapiens
  AACR GENIE Results; KRAS_p.G13D; A0205
VGAGDVGKS

SEQ ID NO: 25170 - protein, 8 aa, Homo sapiens
  AACR GENIE Results; KRAS_p.G13D; B4801
GDVGKSAL

SEQ ID NO: 25171 - protein, 10 aa, Homo sapiens
  AACR GENIE Results; KRAS_p.G13D; B0702
GAGDVGKSAL

SEQ ID NO: 25172 - protein, 9 aa, Homo sapiens
  AACR GENIE Results; KRAS_p.G13D; C0304
AGDVGKSAL

SEQ ID NO: 25173 - protein, 10 aa, Homo sapiens
  AACR GENIE Results; KRAS_p.G13D; A0206
VVVGAGDVGK

SEQ ID NO: 25174 - protein, 11 aa, Homo sapiens
  AACR GENIE Results; KRAS_p.G13D; B4801
VVVGAGDVGKS

SEQ ID NO: 25175 - protein, 11 aa, Homo sapiens
  AACR GENIE Results; KRAS_p.G13D; A1101
LVVVGAGDVGK

SEQ ID NO: 25176 - protein, 9 aa, Homo sapiens
  AACR GENIE Results; KRAS_p.G13D; B3502
AGDVGKSAL

SEQ ID NO: 25177 - protein, 10 aa, Homo sapiens
  AACR GENIE Results; KRAS_p.G13E; A1101
VVVGAGEVGK

SEQ ID NO: 25178 - protein, 8 aa, Homo sapiens
  AACR GENIE Results; KRAS_p.G13E; B4001
GEVGKSAL

SEQ ID NO: 25179 - protein, 11 aa, Homo sapiens
  AACR GENIE Results; KRAS_p.G13E; B0801
VGAGEVGKSAL

SEQ ID NO: 25180 - protein, 10 aa, Homo sapiens
  AACR GENIE Results; KRAS_p.G13E; B4001
GEVGKSALTI

SEQ ID NO: 25181 - protein, 9 aa, Homo sapiens
  AACR GENIE Results; KRAS_p.G13E; A1101
VVGAGEVGK

SEQ ID NO: 25182 - protein, 10 aa, Homo sapiens
  AACR GENIE Results; KRAS_p.G13E; B4403
GEVGKSALTI

SEQ ID NO: 25183 - protein, 11 aa, Homo sapiens
  AACR GENIE Results; KRAS_p.G13E; A1101
LVVVGAGEVGK

SEQ ID NO: 25184 - protein, 9 aa, Homo sapiens
  AACR GENIE Results; KRAS_p.G13E; B0702
AGEVGKSAL

SEQ ID NO: 25185 - protein, 10 aa, Homo sapiens
  AACR GENIE Results; KRAS_p.G13E; A0201
KLVVVGAGEV

SEQ ID NO: 25186 - protein, 9 aa, Homo sapiens
  AACR GENIE Results; KRAS_p.G13E; C0102
AGEVGKSAL

SEQ ID NO: 25187 - protein, 10 aa, Homo sapiens
  AACR GENIE Results; KRAS_p.G13E; A0301
VVVGAGEVGK

SEQ ID NO: 25188 - protein, 11 aa, Homo sapiens
  AACR GENIE Results; KRAS_p.G13R; A3303
EYKLVVVGAGR

SEQ ID NO: 25189 - protein, 10 aa, Homo sapiens
  AACR GENIE Results; KRAS_p.G13R; A1101
VVVGAGRVGK

SEQ ID NO: 25190 - protein, 9 aa, Homo sapiens
  AACR GENIE Results; KRAS_p.G13R; A1101
VVGAGRVGK

SEQ ID NO: 25191 - protein, 10 aa, Homo sapiens
  AACR GENIE Results; KRAS_p.G13R; A0301
VVVGAGRVGK

SEQ ID NO: 25192 - protein, 9 aa, Homo sapiens
  AACR GENIE Results; KRAS_p.G13R; B0702
AGRVGKSAL

SEQ ID NO: 25193 - protein, 11 aa, Homo sapiens
  AACR GENIE Results; KRAS_p.G13R; A3301
EYKLVVVGAGR

SEQ ID NO: 25194 - protein, 10 aa, Homo sapiens
  AACR GENIE Results; KRAS_p.G13R; A6801
VVVGAGRVGK

SEQ ID NO: 25195 - protein, 9 aa, Homo sapiens
  AACR GENIE Results; KRAS_p.G13R; A3101
KLVVVGAGR

SEQ ID NO: 25196 - protein, 9 aa, Homo sapiens
  AACR GENIE Results; KRAS_p.G13R; A0301
VVGAGRVGK

SEQ ID NO: 25197 - protein, 9 aa, Homo sapiens
  AACR GENIE Results; KRAS_p.G13R; B1302
RVGKSALTI

SEQ ID NO: 25198 - protein, 10 aa, Homo sapiens
  AACR GENIE Results; KRAS_p.G13V; A1101
VVVGAGVVGK

SEQ ID NO: 25199 - protein, 9 aa, Homo sapiens
  AACR GENIE Results; KRAS_p.G13V; A1101
VVGAGVVGK

SEQ ID NO: 25200 - protein, 10 aa, Homo sapiens
  AACR GENIE Results; KRAS_p.G13V; A0301
VVVGAGVVGK

SEQ ID NO: 25201 - protein, 9 aa, Homo sapiens
  AACR GENIE Results; KRAS_p.G13V; A0301
VVGAGVVGK

SEQ ID NO: 25202 - protein, 11 aa, Homo sapiens
  AACR GENIE Results; KRAS_p.G13V; A1101
LVVVGAGVVGK

SEQ ID NO: 25203 - protein, 9 aa, Homo sapiens
  AACR GENIE Results; KRAS_p.G13V; B0801
AGVVGKSAL

SEQ ID NO: 25204 - protein, 9 aa, Homo sapiens
  AACR GENIE Results; KRAS_p.G13V; B0702
AGVVGKSAL

SEQ ID NO: 25205 - protein, 9 aa, Homo sapiens
  AACR GENIE Results; KRAS_p.G13V; A0201
KLVVVGAGV

SEQ ID NO: 25206 - protein, 11 aa, Homo sapiens
  AACR GENIE Results; KRAS_p.G13V; A0301
LVVVGAGVVGK

SEQ ID NO: 25207 - protein, 8 aa, Homo sapiens
  AACR GENIE Results; KRAS_p.G13V; A1101
VGAGVVGK

SEQ ID NO: 25208 - protein, 11 aa, Homo sapiens
  AACR GENIE Results; KRAS_p.G13V; B0801
VGAGVVGKSAL

SEQ ID NO: 25209 - protein, 9 aa, Homo sapiens
  AACR GENIE Results; KRAS_p.G13V; B1501
AGVVGKSAL

SEQ ID NO: 25210 - protein, 8 aa, Homo sapiens
  AACR GENIE Results; KRAS_p.G13V; B0801
GVVGKSAL

SEQ ID NO: 25211 - protein, 9 aa, Homo sapiens
  AACR GENIE Results; KRAS_p.G13V; C0102
AGVVGKSAL

SEQ ID NO: 25212 - protein, 9 aa, Homo sapiens
  AACR GENIE Results; KRAS_p.K117N; C0802
NCDLPSRTV

SEQ ID NO: 25213 - protein, 9 aa, Homo sapiens
  AACR GENIE Results; KRAS_p.K117N; C0501
NCDLPSRTV

SEQ ID NO: 25214 - protein, 8 aa, Homo sapiens
  AACR GENIE Results; KRAS_p.L19F; B5101
SAFTIQLI

SEQ ID NO: 25215 - protein, 10 aa, Homo sapiens
  AACR GENIE Results; KRAS_p.L19F; B1501
GAGGVGKSAF

SEQ ID NO: 25216 - protein, 9 aa, Homo sapiens
  AACR GENIE Results; KRAS_p.L19F; B1501
AGGVGKSAF

SEQ ID NO: 25217 - protein, 9 aa, Homo sapiens
  AACR GENIE Results; KRAS_p.L19F; A2601
FTIQLIQNH

SEQ ID NO: 25218 - protein, 9 aa, Homo sapiens
  AACR GENIE Results; KRAS_p.L19F; A1101
FTIQLIQNH

SEQ ID NO: 25219 - protein, 10 aa, Homo sapiens
  AACR GENIE Results; KRAS_p.L19F; B5701
FTIQLIQNHF

SEQ ID NO: 25220 - protein, 9 aa, Homo sapiens
  AACR GENIE Results; KRAS_p.L19F; C1502
KSAFTIQLI

SEQ ID NO: 25221 - protein, 8 aa, Homo sapiens
  AACR GENIE Results; KRAS_p.L19F; C1203
SAFTIQLI

SEQ ID NO: 25222 - protein, 9 aa, Homo sapiens
  AACR GENIE Results; KRAS_p.L19F; B0702
AGGVGKSAF

SEQ ID NO: 25223 - protein, 9 aa, Homo sapiens
  AACR GENIE Results; KRAS_p.L19F; A6801
FTIQLIQNH

SEQ ID NO: 25224 - protein, 8 aa, Homo sapiens
  AACR GENIE Results; KRAS_p.Q22K; B5101
SALTIKLI

SEQ ID NO: 25225 - protein, 10 aa, Homo sapiens
  AACR GENIE Results; KRAS_p.Q22K; B5701
LTIKLIQNHF

SEQ ID NO: 25226 - protein, 9 aa, Homo sapiens
  AACR GENIE Results; KRAS_p.Q22K; B5701
KSALTIKLI

SEQ ID NO: 25227 - protein, 10 aa, Homo sapiens
  AACR GENIE Results; KRAS_p.Q22K; A0301
GVGKSALTIK

SEQ ID NO: 25228 - protein, 9 aa, Homo sapiens
  AACR GENIE Results; KRAS_p.Q22K; B5701
TIKLIQNHF

SEQ ID NO: 25229 - protein, 10 aa, Homo sapiens
  AACR GENIE Results; KRAS_p.Q61H; A0101
ILDTAGHEEY

SEQ ID NO: 25230 - protein, 10 aa, Homo sapiens
  AACR GENIE Results; KRAS_p.Q61H; C0302
ILDTAGHEEY

SEQ ID NO: 25231 - protein, 10 aa, Homo sapiens
  AACR GENIE Results; KRAS_p.Q61H; B1502
ILDTAGHEEY

SEQ ID NO: 25232 - protein, 10 aa, Homo sapiens
  AACR GENIE Results; KRAS_p.Q61H; B1501
ILDTAGHEEY

SEQ ID NO: 25233 - protein, 11 aa, Homo sapiens
  AACR GENIE Results; KRAS_p.Q61H; B3501
DILDTAGHEEY

SEQ ID NO: 25234 - protein, 10 aa, Homo sapiens
  AACR GENIE Results; KRAS_p.Q61H; B5801
ILDTAGHEEY

SEQ ID NO: 25235 - protein, 11 aa, Homo sapiens
  AACR GENIE Results; KRAS_p.Q61H; A2601
DTAGHEEYSAM

SEQ ID NO: 25236 - protein, 11 aa, Homo sapiens
  AACR GENIE Results; KRAS_p.Q61H; B1502
DILDTAGHEEY

SEQ ID NO: 25237 - protein, 10 aa, Homo sapiens
  AACR GENIE Results; KRAS_p.Q61H; B3508
ILDTAGHEEY

SEQ ID NO: 25238 - protein, 11 aa, Homo sapiens
  AACR GENIE Results; KRAS_p.Q61H; A2501
DTAGHEEYSAM

SEQ ID NO: 25239 - protein, 11 aa, Homo sapiens
  AACR GENIE Results; KRAS_p.Q61H; B2702
DILDTAGHEEY

SEQ ID NO: 25240 - protein, 11 aa, Homo sapiens
  AACR GENIE Results; KRAS_p.Q61H; A2601
DILDTAGHEEY

SEQ ID NO: 25241 - protein, 9 aa, Homo sapiens
  AACR GENIE Results; KRAS_p.Q61H; B3501
LDTAGHEEY

SEQ ID NO: 25242 - protein, 10 aa, Homo sapiens
  AACR GENIE Results; KRAS_p.Q61H; B4601
ILDTAGHEEY

SEQ ID NO: 25243 - protein, 10 aa, Homo sapiens
  AACR GENIE Results; KRAS_p.Q61H; B3901
ILDTAGHEEY

SEQ ID NO: 25244 - protein, 10 aa, Homo sapiens
  AACR GENIE Results; KRAS_p.Q61H; A2902
ILDTAGHEEY

SEQ ID NO: 25245 - protein, 11 aa, Homo sapiens
  AACR GENIE Results; KRAS_p.Q61H; B3508
DILDTAGHEEY

SEQ ID NO: 25246 - protein, 10 aa, Homo sapiens
  AACR GENIE Results; KRAS_p.Q61H; C0801
ILDTAGHEEY

SEQ ID NO: 25247 - protein, 10 aa, Homo sapiens
  AACR GENIE Results; KRAS_p.Q61H; A0207
ILDTAGHEEY

SEQ ID NO: 25248 - protein, 9 aa, Homo sapiens
  AACR GENIE Results; KRAS_p.Q61H; B1801
LDTAGHEEY

SEQ ID NO: 25249 - protein, 10 aa, Homo sapiens
  AACR GENIE Results; KRAS_p.Q61H; B3501
ILDTAGHEEY

SEQ ID NO: 25250 - protein, 11 aa, Homo sapiens
  AACR GENIE Results; KRAS_p.Q61H; A3301
DILDTAGHEEY

SEQ ID NO: 25251 - protein, 10 aa, Homo sapiens
  AACR GENIE Results; KRAS_p.Q61H; B3508
TAGHEEYSAM

SEQ ID NO: 25252 - protein, 9 aa, Homo sapiens
  AACR GENIE Results; KRAS_p.Q61H; B3508
LDTAGHEEY

SEQ ID NO: 25253 - protein, 10 aa, Homo sapiens
  AACR GENIE Results; KRAS_p.Q61H; A2901
ILDTAGHEEY

SEQ ID NO: 25254 - protein, 8 aa, Homo sapiens
  AACR GENIE Results; KRAS_p.Q61H; A2601
DTAGHEEY

SEQ ID NO: 25255 - protein, 9 aa, Homo sapiens
  AACR GENIE Results; KRAS_p.Q61H; B2702
LDTAGHEEY

SEQ ID NO: 25256 - protein, 9 aa, Homo sapiens
  AACR GENIE Results; KRAS_p.Q61H; C0801
AGHEEYSAM

SEQ ID NO: 25257 - protein, 9 aa, Homo sapiens
  AACR GENIE Results; KRAS_p.Q61H; A0101
LDTAGHEEY

SEQ ID NO: 25258 - protein, 9 aa, Homo sapiens
  AACR GENIE Results; KRAS_p.Q61H; B3502
AGHEEYSAM

SEQ ID NO: 25259 - protein, 10 aa, Homo sapiens
  AACR GENIE Results; KRAS_p.Q61H; C0802
ILDTAGHEEY

SEQ ID NO: 25260 - protein, 10 aa, Homo sapiens
  AACR GENIE Results; KRAS_p.Q61H; A3002
ILDTAGHEEY

SEQ ID NO: 25261 - protein, 10 aa, Homo sapiens
  AACR GENIE Results; KRAS_p.Q61H; B2702
ILDTAGHEEY

SEQ ID NO: 25262 - protein, 11 aa, Homo sapiens
  AACR GENIE Results; KRAS_p.Q61H; A2902
DILDTAGHEEY

SEQ ID NO: 25263 - protein, 9 aa, Homo sapiens
  AACR GENIE Results; KRAS_p.Q61H; B1501
LDTAGHEEY

SEQ ID NO: 25264 - protein, 10 aa, Homo sapiens
  AACR GENIE Results; KRAS_p.Q61H; B1301
ILDTAGHEEY

SEQ ID NO: 25265 - protein, 9 aa, Homo sapiens
  AACR GENIE Results; KRAS_p.Q61H; B5401
TAGHEEYSA

SEQ ID NO: 25266 - protein, 11 aa, Homo sapiens
  AACR GENIE Results; KRAS_p.Q61H; A2901
DILDTAGHEEY

SEQ ID NO: 25267 - protein, 11 aa, Homo sapiens
  AACR GENIE Results; KRAS_p.Q61H; B1501
DILDTAGHEEY

SEQ ID NO: 25268 - protein, 11 aa, Homo sapiens
  AACR GENIE Results; KRAS_p.Q61H; A6801
DILDTAGHEEY

SEQ ID NO: 25269 - protein, 11 aa, Homo sapiens
  AACR GENIE Results; KRAS_p.Q61H; C0801
DILDTAGHEEY

SEQ ID NO: 25270 - protein, 10 aa, Homo sapiens
  AACR GENIE Results; KRAS_p.Q61K; A0101
ILDTAGKEEY

SEQ ID NO: 25271 - protein, 10 aa, Homo sapiens
  AACR GENIE Results; KRAS_p.Q61K; B1501
ILDTAGKEEY

SEQ ID NO: 25272 - protein, 10 aa, Homo sapiens
  AACR GENIE Results; KRAS_p.Q61K; B5801
ILDTAGKEEY

SEQ ID NO: 25273 - protein, 11 aa, Homo sapiens
  AACR GENIE Results; KRAS_p.Q61K; A2601
DTAGKEEYSAM

SEQ ID NO: 25274 - protein, 11 aa, Homo sapiens
  AACR GENIE Results; KRAS_p.Q61K; B3501
DILDTAGKEEY

SEQ ID NO: 25275 - protein, 10 aa, Homo sapiens
  AACR GENIE Results; KRAS_p.Q61K; B3901
ILDTAGKEEY

SEQ ID NO: 25276 - protein, 9 aa, Homo sapiens
  AACR GENIE Results; KRAS_p.Q61K; B2702
LDILDTAGK

SEQ ID NO: 25277 - protein, 11 aa, Homo sapiens
  AACR GENIE Results; KRAS_p.Q61K; A2601
DILDTAGKEEY

SEQ ID NO: 25278 - protein, 10 aa, Homo sapiens
  AACR GENIE Results; KRAS_p.Q61K; B3501
ILDTAGKEEY

SEQ ID NO: 25279 - protein, 9 aa, Homo sapiens
  AACR GENIE Results; KRAS_p.Q61K; B3501
LDTAGKEEY

SEQ ID NO: 25280 - protein, 10 aa, Homo sapiens
  AACR GENIE Results; KRAS_p.Q61K; B3501
TAGKEEYSAM

SEQ ID NO: 25281 - protein, 11 aa, Homo sapiens
  AACR GENIE Results; KRAS_p.Q61K; B2702
DILDTAGKEEY

SEQ ID NO: 25282 - protein, 10 aa, Homo sapiens
  AACR GENIE Results; KRAS_p.Q61K; A2902
ILDTAGKEEY

SEQ ID NO: 25283 - protein, 10 aa, Homo sapiens
  AACR GENIE Results; KRAS_p.Q61K; B3503
TAGKEEYSAM

SEQ ID NO: 25284 - protein, 10 aa, Homo sapiens
  AACR GENIE Results; KRAS_p.Q61K; B2702
LLDILDTAGK

SEQ ID NO: 25285 - protein, 9 aa, Homo sapiens
  AACR GENIE Results; KRAS_p.Q61K; B1501
AGKEEYSAM

SEQ ID NO: 25286 - protein, 10 aa, Homo sapiens
  AACR GENIE Results; KRAS_p.Q61K; A3002
ILDTAGKEEY

SEQ ID NO: 25287 - protein, 10 aa, Homo sapiens
  AACR GENIE Results; KRAS_p.Q61K; B3502
TAGKEEYSAM

SEQ ID NO: 25288 - protein, 10 aa, Homo sapiens
  AACR GENIE Results; KRAS_p.Q61L; A0101
ILDTAGLEEY

SEQ ID NO: 25289 - protein, 10 aa, Homo sapiens
  AACR GENIE Results; KRAS_p.Q61L; C0302
ILDTAGLEEY

SEQ ID NO: 25290 - protein, 11 aa, Homo sapiens
  AACR GENIE Results; KRAS_p.Q61L; A2601
DTAGLEEYSAM

SEQ ID NO: 25291 - protein, 10 aa, Homo sapiens
  AACR GENIE Results; KRAS_p.Q61L; B5801
ILDTAGLEEY

SEQ ID NO: 25292 - protein, 11 aa, Homo sapiens
  AACR GENIE Results; KRAS_p.Q61L; B3501
DILDTAGLEEY

SEQ ID NO: 25293 - protein, 10 aa, Homo sapiens
  AACR GENIE Results; KRAS_p.Q61L; B1501
ILDTAGLEEY

SEQ ID NO: 25294 - protein, 11 aa, Homo sapiens
  AACR GENIE Results; KRAS_p.Q61L; A2601
DILDTAGLEEY

SEQ ID NO: 25295 - protein, 10 aa, Homo sapiens
  AACR GENIE Results; KRAS_p.Q61L; A6802
DTAGLEEYSA

SEQ ID NO: 25296 - protein, 9 aa, Homo sapiens
  AACR GENIE Results; KRAS_p.Q61L; B3501
LDTAGLEEY

SEQ ID NO: 25297 - protein, 10 aa, Homo sapiens
  AACR GENIE Results; KRAS_p.Q61L; B3901
ILDTAGLEEY

SEQ ID NO: 25298 - protein, 8 aa, Homo sapiens
  AACR GENIE Results; KRAS_p.Q61L; A2601
DTAGLEEY

SEQ ID NO: 25299 - protein, 11 aa, Homo sapiens
  AACR GENIE Results; KRAS_p.Q61L; B2702
DILDTAGLEEY

SEQ ID NO: 25300 - protein, 9 aa, Homo sapiens
  AACR GENIE Results; KRAS_p.Q61L; C0801
AGLEEYSAM

SEQ ID NO: 25301 - protein, 10 aa, Homo sapiens
  AACR GENIE Results; KRAS_p.Q61L; B3501
ILDTAGLEEY

SEQ ID NO: 25302 - protein, 10 aa, Homo sapiens
  AACR GENIE Results; KRAS_p.Q61L; B3501
TAGLEEYSAM

SEQ ID NO: 25303 - protein, 11 aa, Homo sapiens
  AACR GENIE Results; KRAS_p.Q61L; A3301
DILDTAGLEEY

SEQ ID NO: 25304 - protein, 9 aa, Homo sapiens
  AACR GENIE Results; KRAS_p.Q61L; B1801
LDTAGLEEY

SEQ ID NO: 25305 - protein, 10 aa, Homo sapiens
  AACR GENIE Results; KRAS_p.Q61L; A2902
ILDTAGLEEY

SEQ ID NO: 25306 - protein, 10 aa, Homo sapiens
  AACR GENIE Results; KRAS_p.Q61L; B3503
TAGLEEYSAM

SEQ ID NO: 25307 - protein, 10 aa, Homo sapiens
  AACR GENIE Results; KRAS_p.Q61L; B2702
ILDTAGLEEY

SEQ ID NO: 25308 - protein, 11 aa, Homo sapiens
  AACR GENIE Results; KRAS_p.Q61L; B1501
DILDTAGLEEY

SEQ ID NO: 25309 - protein, 10 aa, Homo sapiens
  AACR GENIE Results; KRAS_p.Q61L; A0201
ILDTAGLEEY

SEQ ID NO: 25310 - protein, 9 aa, Homo sapiens
  AACR GENIE Results; KRAS_p.Q61L; B4002
LDILDTAGL

SEQ ID NO: 25311 - protein, 10 aa, Homo sapiens
  AACR GENIE Results; KRAS_p.Q61R; A0101
ILDTAGREEY

SEQ ID NO: 25312 - protein, 10 aa, Homo sapiens
  AACR GENIE Results; KRAS_p.Q61R; C0302
ILDTAGREEY

SEQ ID NO: 25313 - protein, 10 aa, Homo sapiens
  AACR GENIE Results; KRAS_p.Q61R; B3508
TAGREEYSAM

SEQ ID NO: 25314 - protein, 10 aa, Homo sapiens
  AACR GENIE Results; KRAS_p.Q61R; B1501
ILDTAGREEY

SEQ ID NO: 25315 - protein, 10 aa, Homo sapiens
  AACR GENIE Results; KRAS_p.Q61R; B1502
ILDTAGREEY

SEQ ID NO: 25316 - protein, 10 aa, Homo sapiens
  AACR GENIE Results; KRAS_p.Q61R; B5801
ILDTAGREEY

SEQ ID NO: 25317 - protein, 11 aa, Homo sapiens
  AACR GENIE Results; KRAS_p.Q61R; B3501
DILDTAGREEY

SEQ ID NO: 25318 - protein, 11 aa, Homo sapiens
  AACR GENIE Results; KRAS_p.Q61R; A2601
DILDTAGREEY

SEQ ID NO: 25319 - protein, 11 aa, Homo sapiens
  AACR GENIE Results; KRAS_p.Q61R; A2601
DTAGREEYSAM

SEQ ID NO: 25320 - protein, 11 aa, Homo sapiens
  AACR GENIE Results; KRAS_p.Q61R; B1502
DILDTAGREEY

SEQ ID NO: 25321 - protein, 10 aa, Homo sapiens
  AACR GENIE Results; KRAS_p.Q61R; B2702
ILDTAGREEY

SEQ ID NO: 25322 - protein, 10 aa, Homo sapiens
  AACR GENIE Results; KRAS_p.Q61R; B4601
ILDTAGREEY

SEQ ID NO: 25323 - protein, 10 aa, Homo sapiens
  AACR GENIE Results; KRAS_p.Q61R; B3901
ILDTAGREEY

SEQ ID NO: 25324 - protein, 10 aa, Homo sapiens
  AACR GENIE Results; KRAS_p.Q61R; B3508
ILDTAGREEY

SEQ ID NO: 25325 - protein, 11 aa, Homo sapiens
  AACR GENIE Results; KRAS_p.Q61R; B3508
DILDTAGREEY

SEQ ID NO: 25326 - protein, 10 aa, Homo sapiens
  AACR GENIE Results; KRAS_p.Q61R; A2902
ILDTAGREEY

SEQ ID NO: 25327 - protein, 9 aa, Homo sapiens
  AACR GENIE Results; KRAS_p.Q61R; B2702
LDILDTAGR

SEQ ID NO: 25328 - protein, 11 aa, Homo sapiens
  AACR GENIE Results; KRAS_p.Q61R; A2501
DTAGREEYSAM

SEQ ID NO: 25329 - protein, 10 aa, Homo sapiens
  AACR GENIE Results; KRAS_p.Q61R; A3002
ILDTAGREEY

SEQ ID NO: 25330 - protein, 9 aa, Homo sapiens
  AACR GENIE Results; KRAS_p.Q61R; B2705
GREEYSAMR

SEQ ID NO: 25331 - protein, 11 aa, Homo sapiens
  AACR GENIE Results; KRAS_p.Q61R; B2702
DILDTAGREEY

SEQ ID NO: 25332 - protein, 9 aa, Homo sapiens
  AACR GENIE Results; KRAS_p.Q61R; B3508
LDTAGREEY

SEQ ID NO: 25333 - protein, 9 aa, Homo sapiens
  AACR GENIE Results; KRAS_p.Q61R; B3501
LDTAGREEY

SEQ ID NO: 25334 - protein, 10 aa, Homo sapiens
  AACR GENIE Results; KRAS_p.Q61R; B3501
ILDTAGREEY

SEQ ID NO: 25335 - protein, 11 aa, Homo sapiens
  AACR GENIE Results; KRAS_p.Q61R; B1801
DILDTAGREEY

SEQ ID NO: 25336 - protein, 10 aa, Homo sapiens
  AACR GENIE Results; KRAS_p.Q61R; B3501
TAGREEYSAM

SEQ ID NO: 25337 - protein, 11 aa, Homo sapiens
  AACR GENIE Results; KRAS_p.Q61R; B1501
DILDTAGREEY

SEQ ID NO: 25338 - protein, 10 aa, Homo sapiens
  AACR GENIE Results; KRAS_p.Q61R; B5701
ILDTAGREEY

SEQ ID NO: 25339 - protein, 11 aa, Homo sapiens
  AACR GENIE Results; KRAS_p.Q61R; A2501
DILDTAGREEY

SEQ ID NO: 25340 - protein, 10 aa, Homo sapiens
  AACR GENIE Results; KRAS_p.Q61R; A0207
ILDTAGREEY

SEQ ID NO: 25341 - protein, 10 aa, Homo sapiens
  AACR GENIE Results; KRAS_p.Q61R; B3503
TAGREEYSAM

SEQ ID NO: 25342 - protein, 10 aa, Homo sapiens
  AACR GENIE Results; KRAS_p.Q61R; B3502
TAGREEYSAM

SEQ ID NO: 25343 - protein, 10 aa, Homo sapiens
  AACR GENIE Results; KRAS_p.Q61R; C0801
ILDTAGREEY

SEQ ID NO: 25344 - protein, 10 aa, Homo sapiens
  AACR GENIE Results; KRAS_p.V14I; A1101
VVVGAGGIGK

SEQ ID NO: 25345 - protein, 9 aa, Homo sapiens
  AACR GENIE Results; KRAS_p.V14I; A1101
VVGAGGIGK

SEQ ID NO: 25346 - protein, 10 aa, Homo sapiens
  AACR GENIE Results; KRAS_p.V14I; A6801
VVVGAGGIGK

SEQ ID NO: 25347 - protein, 9 aa, Homo sapiens
  AACR GENIE Results; KRAS_p.V14I; A0301
VVGAGGIGK

SEQ ID NO: 25348 - protein, 10 aa, Homo sapiens
  AACR GENIE Results; KRAS_p.V14I; A0301
VVVGAGGIGK

SEQ ID NO: 25349 - protein, 9 aa, Homo sapiens
  AACR GENIE Results; KRAS_p.V14I; B1302
GIGKSALTI

SEQ ID NO: 25350 - protein, 11 aa, Homo sapiens
  AACR GENIE Results; KRAS_p.V14I; B0801
VGAGGIGKSAL

SEQ ID NO: 25351 - protein, 9 aa, Homo sapiens
  AACR GENIE Results; KRAS_p.V14I; B0702
AGGIGKSAL

SEQ ID NO: 25352 - protein, 11 aa, Homo sapiens
  AACR GENIE Results; KRAS_p.V14I; C0704
VVVGAGGIGKS

SEQ ID NO: 25353 - protein, 8 aa, Homo sapiens
  AACR GENIE Results; KRAS_p.V14I; B5101
IGKSALTI

SEQ ID NO: 25354 - protein, 10 aa, Homo sapiens
  AACR GENIE Results; KRAS_p.V14I; A3001
VVVGAGGIGK

SEQ ID NO: 25355 - protein, 8 aa, Homo sapiens
  AACR GENIE Results; KRAS_p.V14I; B0801
GGIGKSAL

SEQ ID NO: 25356 - protein, 10 aa, Homo sapiens
  AACR GENIE Results; KRAS_p.V14I; B1302
GGIGKSALTI

SEQ ID NO: 25357 - protein, 10 aa, Homo sapiens
  AACR GENIE Results; KRAS_p.V14I; B2702
VVVGAGGIGK

SEQ ID NO: 25358 - protein, 11 aa, Homo sapiens
  AACR GENIE Results; KRAS_p.V14I; A1101
VVVGAGGIGKS

SEQ ID NO: 25359 - protein, 11 aa, Homo sapiens
  AACR GENIE Results; KRAS_p.V14I; B2702
LVVVGAGGIGK

SEQ ID NO: 25360 - protein, 11 aa, Homo sapiens
  AACR GENIE Results; KRAS_p.V14I; A6801
VVVGAGGIGKS

SEQ ID NO: 25361 - protein, 11 aa, Homo sapiens
  AACR GENIE Results; KRAS_p.V14I; A2601
VVVGAGGIGKS

SEQ ID NO: 25362 - protein, 9 aa, Homo sapiens
  AACR GENIE Results; KRAS_p.V14I; A6801
VVGAGGIGK

SEQ ID NO: 25363 - protein, 11 aa, Homo sapiens
  AACR GENIE Results; KRAS_p.V14I; A0301
LVVVGAGGIGK

SEQ ID NO: 25364 - protein, 11 aa, Homo sapiens
  AACR GENIE Results; KRAS_p.V14I; A1101
LVVVGAGGIGK

SEQ ID NO: 25365 - protein, 11 aa, Homo sapiens
  AACR GENIE Results; KRAS_p.V14I; A3101
VVVGAGGIGKS

SEQ ID NO: 25366 - protein, 9 aa, Homo sapiens
  AACR GENIE Results; LMO2_p.E145K; A1101
LINSDIVCK

SEQ ID NO: 25367 - protein, 10 aa, Homo sapiens
  AACR GENIE Results; LMO2_p.E145K; B5701
IVCKQDIYEW

SEQ ID NO: 25368 - protein, 9 aa, Homo sapiens
  AACR GENIE Results; LMO2_p.E145K; A0301
LINSDIVCK

SEQ ID NO: 25369 - protein, 8 aa, Homo sapiens
  AACR GENIE Results; LMO2_p.E145K; A1101
INSDIVCK

SEQ ID NO: 25370 - protein, 10 aa, Homo sapiens
  AACR GENIE Results; MAP2K1_p.C121S; A2601
ESNSPYIVGF

SEQ ID NO: 25371 - protein, 9 aa, Homo sapiens
  AACR GENIE Results; MAP2K1_p.C121S; B1501
VLHESNSPY

SEQ ID NO: 25372 - protein, 9 aa, Homo sapiens
  AACR GENIE Results; MAP2K1_p.D67N; B1402
DNFEKISEL

SEQ ID NO: 25373 - protein, 9 aa, Homo sapiens
  AACR GENIE Results; MAP2K1_p.D67N; B0801
DNFEKISEL

SEQ ID NO: 25374 - protein, 8 aa, Homo sapiens
  AACR GENIE Results; MAP2K1_p.G128D; B3501
SPYIVDFY

SEQ ID NO: 25375 - protein, 9 aa, Homo sapiens
  AACR GENIE Results; MAP2K1_p.G128D; A2902
NSPYIVDFY

SEQ ID NO: 25376 - protein, 9 aa, Homo sapiens
  AACR GENIE Results; MAP2K1_p.G128D; A0101
NSPYIVDFY

SEQ ID NO: 25377 - protein, 10 aa, Homo sapiens
  AACR GENIE Results; MAP2K1_p.G128D; A2902
YIVDFYGAFY

SEQ ID NO: 25378 - protein, 8 aa, Homo sapiens
  AACR GENIE Results; MAP2K1_p.G128D; B1801
SPYIVDFY

SEQ ID NO: 25379 - protein, 9 aa, Homo sapiens
  AACR GENIE Results; MAP2K1_p.K57E; A6801
EAFLTQEQK

SEQ ID NO: 25380 - protein, 9 aa, Homo sapiens
  AACR GENIE Results; MAP2K1_p.K57E; B2702
EAFLTQEQK

SEQ ID NO: 25381 - protein, 10 aa, Homo sapiens
  AACR GENIE Results; MAP2K1_p.K57E; B2702
LEAFLTQEQK

SEQ ID NO: 25382 - protein, 9 aa, Homo sapiens
  AACR GENIE Results; MAP2K1_p.K57E; C0802
TQEQKVGEL

SEQ ID NO: 25383 - protein, 10 aa, Homo sapiens
  AACR GENIE Results; MAP2K1_p.K57E; A6801
EAFLTQEQKV

SEQ ID NO: 25384 - protein, 10 aa, Homo sapiens
  AACR GENIE Results; MAP2K1_p.K57E; B5101
EAFLTQEQKV

SEQ ID NO: 25385 - protein, 8 aa, Homo sapiens
  AACR GENIE Results; MAP2K1_p.K57E; B1302
FLTQEQKV

SEQ ID NO: 25386 - protein, 8 aa, Homo sapiens
  AACR GENIE Results; MAP2K1_p.K57E; B4001
QEQKVGEL

SEQ ID NO: 25387 - protein, 9 aa, Homo sapiens
  AACR GENIE Results; MAP2K1_p.K57N; A6801
EAFLTQNQK

SEQ ID NO: 25388 - protein, 9 aa, Homo sapiens
  AACR GENIE Results; MAP2K1_p.K57N; B1501
TQNQKVGEL

SEQ ID NO: 25389 - protein, 10 aa, Homo sapiens
  AACR GENIE Results; MAP2K1_p.K57N; A6801
EAFLTQNQKV

SEQ ID NO: 25390 - protein, 9 aa, Homo sapiens
  AACR GENIE Results; MAP2K1_p.K57N; B0801
TQNQKVGEL

SEQ ID NO: 25391 - protein, 10 aa, Homo sapiens
  AACR GENIE Results; MAP2K1_p.K57N; A1101
TQNQKVGELK

SEQ ID NO: 25392 - protein, 10 aa, Homo sapiens
  AACR GENIE Results; MAP2K1_p.K57N; B5101
EAFLTQNQKV

SEQ ID NO: 25393 - protein, 10 aa, Homo sapiens
  AACR GENIE Results; MAP2K1_p.K57N; B2702
LEAFLTQNQK

SEQ ID NO: 25394 - protein, 8 aa, Homo sapiens
  AACR GENIE Results; MAP2K1_p.K57N; B1302
FLTQNQKV

SEQ ID NO: 25395 - protein, 9 aa, Homo sapiens
  AACR GENIE Results; MAP2K1_p.K57N; B1402
TQNQKVGEL

SEQ ID NO: 25396 - protein, 9 aa, Homo sapiens
  AACR GENIE Results; MAP2K1_p.K57N; A1101
EAFLTQNQK

SEQ ID NO: 25397 - protein, 9 aa, Homo sapiens
  AACR GENIE Results; MAP2K1_p.K57N; B2702
EAFLTQNQK

SEQ ID NO: 25398 - protein, 11 aa, Homo sapiens
  AACR GENIE Results; MAP2K1_p.K57N; B4901
LEAFLTQNQKV

SEQ ID NO: 25399 - protein, 9 aa, Homo sapiens
  AACR GENIE Results; MAP2K1_p.Q56P; B0702
TPKQKVGEL

SEQ ID NO: 25400 - protein, 9 aa, Homo sapiens
  AACR GENIE Results; MAP2K1_p.Q56P; B0801
TPKQKVGEL

SEQ ID NO: 25401 - protein, 10 aa, Homo sapiens
  AACR GENIE Results; MAP2K1_p.Q56P; B5101
EAFLTPKQKV

SEQ ID NO: 25402 - protein, 9 aa, Homo sapiens
  AACR GENIE Results; MAP2K1_p.Q56P; A0301
RLEAFLTPK

SEQ ID NO: 25403 - protein, 11 aa, Homo sapiens
  AACR GENIE Results; MAP2K2_p.E288del; C0802
VVDGEGEPHSI

SEQ ID NO: 25404 - protein, 8 aa, Homo sapiens
  AACR GENIE Results; MAP2K2_p.E288del; B4403
GEGEPHSI

SEQ ID NO: 25405 - protein, 9 aa, Homo sapiens
  AACR GENIE Results; MAP2K4_p.P326L; B1501
VVKGDPLQL

SEQ ID NO: 25406 - protein, 9 aa, Homo sapiens
  AACR GENIE Results; MAP2K4_p.P326L; B0801
VVKGDPLQL

SEQ ID NO: 25407 - protein, 9 aa, Homo sapiens
  AACR GENIE Results; MAX_p.R60Q; A1101
ASQAQILDK

SEQ ID NO: 25408 - protein, 11 aa, Homo sapiens
  AACR GENIE Results; MAX_p.R60Q; B3501
QAQILDKATEY

SEQ ID NO: 25409 - protein, 8 aa, Homo sapiens
  AACR GENIE Results; MAX_p.R60Q; A1101
SQAQILDK

SEQ ID NO: 25410 - protein, 10 aa, Homo sapiens
  AACR GENIE Results; MAX_p.R60Q; A1101
KASQAQILDK

SEQ ID NO: 25411 - protein, 10 aa, Homo sapiens
  AACR GENIE Results; MAX_p.R60Q; A0301
KASQAQILDK

SEQ ID NO: 25412 - protein, 11 aa, Homo sapiens
  AACR GENIE Results; MCL1_p.G49R; B4001
REIRGGEAGAV

SEQ ID NO: 25413 - protein, 9 aa, Homo sapiens
  AACR GENIE Results; MDM4_p.S367L; A0301
ILAPVVRPK

SEQ ID NO: 25414 - protein, 9 aa, Homo sapiens
  AACR GENIE Results; MDM4_p.S367L; A3101
RTILAPVVR

SEQ ID NO: 25415 - protein, 9 aa, Homo sapiens
  AACR GENIE Results; MDM4_p.S367L; A1101
ILAPVVRPK

SEQ ID NO: 25416 - protein, 10 aa, Homo sapiens
  AACR GENIE Results; MDM4_p.S367L; A0301
TILAPVVRPK

SEQ ID NO: 25417 - protein, 8 aa, Homo sapiens
  AACR GENIE Results; MDM4_p.S367L; A3101
TILAPVVR

SEQ ID NO: 25418 - protein, 11 aa, Homo sapiens
  AACR GENIE Results; MDM4_p.S367L; A0301
RTILAPVVRPK

SEQ ID NO: 25419 - protein, 9 aa, Homo sapiens
  AACR GENIE Results; MDM4_p.S367L; B5701
RTILAPVVR

SEQ ID NO: 25420 - protein, 10 aa, Homo sapiens
  AACR GENIE Results; MDM4_p.S367L; A1101
TILAPVVRPK

SEQ ID NO: 25421 - protein, 11 aa, Homo sapiens
  AACR GENIE Results; MDM4_p.S367L; A1101
RTILAPVVRPK

SEQ ID NO: 25422 - protein, 9 aa, Homo sapiens
  AACR GENIE Results; MDM4_p.S367L; B0702
VPDCRRTIL

SEQ ID NO: 25423 - protein, 11 aa, Homo sapiens
  AACR GENIE Results; MED12_p.A831V; B3501
FPTAEDIFVKF

SEQ ID NO: 25424 - protein, 9 aa, Homo sapiens
  AACR GENIE Results; MED12_p.A831V; B3501
TAEDIFVKF

SEQ ID NO: 25425 - protein, 9 aa, Homo sapiens
  AACR GENIE Results; MED12_p.A831V; C0501
TAEDIFVKF

SEQ ID NO: 25426 - protein, 9 aa, Homo sapiens
  AACR GENIE Results; MED12_p.A831V; C0202
TAEDIFVKF

SEQ ID NO: 25427 - protein, 9 aa, Homo sapiens
  AACR GENIE Results; MET_p.A48T; B4901
TETPIQNVI

SEQ ID NO: 25428 - protein, 8 aa, Homo sapiens
  AACR GENIE Results; MET_p.A48T; B4901
TETPIQNV

SEQ ID NO: 25429 - protein, 10 aa, Homo sapiens
  AACR GENIE Results; MET_p.A48T; B4001
TETPIQNVIL

SEQ ID NO: 25430 - protein, 9 aa, Homo sapiens
  AACR GENIE Results; MET_p.A48T; B4001
TETPIQNVI

SEQ ID NO: 25431 - protein, 9 aa, Homo sapiens
  AACR GENIE Results; MET_p.A48T; B4403
TETPIQNVI

SEQ ID NO: 25432 - protein, 9 aa, Homo sapiens
  AACR GENIE Results; MET_p.A48T; A3001
TETPIQNVI

SEQ ID NO: 25433 - protein, 9 aa, Homo sapiens
  AACR GENIE Results; MET_p.L14F; B1501
VLAPGILVF

SEQ ID NO: 25434 - protein, 9 aa, Homo sapiens
  AACR GENIE Results; MET_p.L14F; C1701
LAPGILVFL

SEQ ID NO: 25435 - protein, 10 aa, Homo sapiens
  AACR GENIE Results; MET_p.L14F; C1701
VLAPGILVFL

SEQ ID NO: 25436 - protein, 10 aa, Homo sapiens
  AACR GENIE Results; MET_p.L14F; A0201
VLAPGILVFL

SEQ ID NO: 25437 - protein, 11 aa, Homo sapiens
  AACR GENIE Results; MET_p.V504F; A0301
TLFITGKKITK

SEQ ID NO: 25438 - protein, 9 aa, Homo sapiens
  AACR GENIE Results; MET_p.V504F; A1101
GYTLFITGK

SEQ ID NO: 25439 - protein, 9 aa, Homo sapiens
  AACR GENIE Results; MPL_p.R357Q; B1302
SQNDSIIHI

SEQ ID NO: 25440 - protein, 9 aa, Homo sapiens
  AACR GENIE Results; MPL_p.R357Q; B3801
SQNDSIIHI

SEQ ID NO: 25441 - protein, 11 aa, Homo sapiens
  AACR GENIE Results; MPL_p.R357Q; B5701
KSQNDSIIHIL

SEQ ID NO: 25442 - protein, 10 aa, Homo sapiens
  AACR GENIE Results; MPL_p.R357Q; B3801
SQNDSIIHIL

SEQ ID NO: 25443 - protein, 9 aa, Homo sapiens
  AACR GENIE Results; MSH2_p.R406Q; A0205
QLYQGINQL

SEQ ID NO: 25444 - protein, 9 aa, Homo sapiens
  AACR GENIE Results; MSH2_p.R406Q; A0201
QLYQGINQL

SEQ ID NO: 25445 - protein, 9 aa, Homo sapiens
  AACR GENIE Results; MSH2_p.R406Q; B1302
QLYQGINQL

SEQ ID NO: 25446 - protein, 9 aa, Homo sapiens
  AACR GENIE Results; MSH2_p.R406Q; B5001
QLYQGINQL

SEQ ID NO: 25447 - protein, 9 aa, Homo sapiens
  AACR GENIE Results; MSH2_p.R406Q; B3901
QLYQGINQL

SEQ ID NO: 25448 - protein, 9 aa, Homo sapiens
  AACR GENIE Results; MSH2_p.R406Q; B3801
QLYQGINQL

SEQ ID NO: 25449 - protein, 9 aa, Homo sapiens
  AACR GENIE Results; MSH2_p.R406Q; B1501
QLYQGINQL

SEQ ID NO: 25450 - protein, 9 aa, Homo sapiens
  AACR GENIE Results; MSH2_p.R406Q; B5101
DCYQLYQGI

SEQ ID NO: 25451 - protein, 9 aa, Homo sapiens
  AACR GENIE Results; MSH2_p.R406Q; B0801
QLYQGINQL

SEQ ID NO: 25452 - protein, 9 aa, Homo sapiens
  AACR GENIE Results; MSH2_p.R406Q; A0301
QLYQGINQL

SEQ ID NO: 25453 - protein, 9 aa, Homo sapiens
  AACR GENIE Results; MSH2_p.R406Q; A3001
QLYQGINQL

SEQ ID NO: 25454 - protein, 9 aa, Homo sapiens
  AACR GENIE Results; MSH6_p.E807K; B5101
VPDKISKVV

SEQ ID NO: 25455 - protein, 8 aa, Homo sapiens
  AACR GENIE Results; MSH6_p.E807K; B5101
VPDKISKV

SEQ ID NO: 25456 - protein, 10 aa, Homo sapiens
  AACR GENIE Results; MSH6_p.E807K; A0301
KISKVVELLK

SEQ ID NO: 25457 - protein, 9 aa, Homo sapiens
  AACR GENIE Results; MSH6_p.E807K; A2601
VVPDKISKV

SEQ ID NO: 25458 - protein, 9 aa, Homo sapiens
  AACR GENIE Results; MSH6_p.E807K; B0801
DKISKVVEL

SEQ ID NO: 25459 - protein, 9 aa, Homo sapiens
  AACR GENIE Results; MSH6_p.E807K; B1402
DKISKVVEL

SEQ ID NO: 25460 - protein, 9 aa, Homo sapiens
  AACR GENIE Results; MSH6_p.E807K; A0201
VVPDKISKV

SEQ ID NO: 25461 - protein, 9 aa, Homo sapiens
  AACR GENIE Results; MSH6_p.E807K; A6801
MVVPDKISK

SEQ ID NO: 25462 - protein, 9 aa, Homo sapiens
  AACR GENIE Results; MSH6_p.E807K; A1101
MVVPDKISK

SEQ ID NO: 25463 - protein, 11 aa, Homo sapiens
  AACR GENIE Results; MSH6_p.E807K; B0702
VPDKISKVVEL

SEQ ID NO: 25464 - protein, 9 aa, Homo sapiens
  AACR GENIE Results; MSH6_p.E807K; B0702
VPDKISKVV

SEQ ID NO: 25465 - protein, 8 aa, Homo sapiens
  AACR GENIE Results; MSH6_p.E807K; B5701
ISKVVELL

SEQ ID NO: 25466 - protein, 10 aa, Homo sapiens
  AACR GENIE Results; MSH6_p.E807K; A2601
MVVPDKISKV

SEQ ID NO: 25467 - protein, 9 aa, Homo sapiens
  AACR GENIE Results; MSH6_p.E807K; B3501
MVVPDKISK

SEQ ID NO: 25468 - protein, 9 aa, Homo sapiens
  AACR GENIE Results; MSH6_p.E807K; B5701
ISKVVELLK

SEQ ID NO: 25469 - protein, 9 aa, Homo sapiens
  AACR GENIE Results; MSH6_p.R1095H; A1101
GSHHPCITK

SEQ ID NO: 25470 - protein, 9 aa, Homo sapiens
  AACR GENIE Results; MSH6_p.R1095H; A0301
GSHHPCITK

SEQ ID NO: 25471 - protein, 9 aa, Homo sapiens
  AACR GENIE Results; MSH6_p.R1334W; A6802
QSLRLFWEV

SEQ ID NO: 25472 - protein, 8 aa, Homo sapiens
  AACR GENIE Results; MSH6_p.V1160I; B5101
IPAEVCRL

SEQ ID NO: 25473 - protein, 8 aa, Homo sapiens
  AACR GENIE Results; MSH6_p.V1160I; B0702
IPAEVCRL

SEQ ID NO: 25474 - protein, 10 aa, Homo sapiens
  AACR GENIE Results; MSH6_p.V1160I; A2402
CYIPAEVCRL

SEQ ID NO: 25475 - protein, 9 aa, Homo sapiens
  AACR GENIE Results; MTOR_p.A2420V; B3501
MAVLEVFVY

SEQ ID NO: 25476 - protein, 9 aa, Homo sapiens
  AACR GENIE Results; MTOR_p.A2420V; B1501
SVMAVLEVF

SEQ ID NO: 25477 - protein, 9 aa, Homo sapiens
  AACR GENIE Results; MTOR_p.A2420V; B5101
DSVMAVLEV

SEQ ID NO: 25478 - protein, 9 aa, Homo sapiens
  AACR GENIE Results; MTOR_p.A2420V; B3501
SVMAVLEVF

SEQ ID NO: 25479 - protein, 10 aa, Homo sapiens
  AACR GENIE Results; MTOR_p.A2420V; A2402
VFVYDPLLNW

SEQ ID NO: 25480 - protein, 9 aa, Homo sapiens
  AACR GENIE Results; MTOR_p.A2420V; A0201
VMAVLEVFV

SEQ ID NO: 25481 - protein, 8 aa, Homo sapiens
  AACR GENIE Results; MTOR_p.A2420V; B1501
AVLEVFVY

SEQ ID NO: 25482 - protein, 9 aa, Homo sapiens
  AACR GENIE Results; MTOR_p.E1799K; A2902
MNFKAVLHY

SEQ ID NO: 25483 - protein, 8 aa, Homo sapiens
  AACR GENIE Results; MTOR_p.E1799K; B0801
VMNFKAVL

SEQ ID NO: 25484 - protein, 11 aa, Homo sapiens
  AACR GENIE Results; MTOR_p.E1799K; A2902
AVMNFKAVLHY

SEQ ID NO: 25485 - protein, 9 aa, Homo sapiens
  AACR GENIE Results; MTOR_p.E1799K; B0702
AVMNFKAVL

SEQ ID NO: 25486 - protein, 9 aa, Homo sapiens
  AACR GENIE Results; MTOR_p.E1799K; B1501
AVMNFKAVL

SEQ ID NO: 25487 - protein, 9 aa, Homo sapiens
  AACR GENIE Results; MTOR_p.E1799K; A0301
VMNFKAVLH

SEQ ID NO: 25488 - protein, 9 aa, Homo sapiens
  AACR GENIE Results; MTOR_p.I2500F; C1203
KAIQFINRV

SEQ ID NO: 25489 - protein, 9 aa, Homo sapiens
  AACR GENIE Results; MTOR_p.I2500F; C0602
KAIQFINRV

SEQ ID NO: 25490 - protein, 9 aa, Homo sapiens
  AACR GENIE Results; MTOR_p.I2500F; C0202
KAIQFINRV

SEQ ID NO: 25491 - protein, 9 aa, Homo sapiens
  AACR GENIE Results; MTOR_p.I2500F; B1501
ALNKKAIQF

SEQ ID NO: 25492 - protein, 9 aa, Homo sapiens
  AACR GENIE Results; MTOR_p.M2327I; A2402
NYTRSLAVI

SEQ ID NO: 25493 - protein, 8 aa, Homo sapiens
  AACR GENIE Results; MTOR_p.M2327I; B1501
AVISMVGY

SEQ ID NO: 25494 - protein, 8 aa, Homo sapiens
  AACR GENIE Results; MTOR_p.M2327I; C0304
ISMVGYIL

SEQ ID NO: 25495 - protein, 9 aa, Homo sapiens
  AACR GENIE Results; MTOR_p.M2327I; B3501
LAVISMVGY

SEQ ID NO: 25496 - protein, 9 aa, Homo sapiens
  AACR GENIE Results; MTOR_p.M2327I; B1501
LAVISMVGY

SEQ ID NO: 25497 - protein, 8 aa, Homo sapiens
  AACR GENIE Results; MTOR_p.M2327I; A0201
SLAVISMV

SEQ ID NO: 25498 - protein, 10 aa, Homo sapiens
  AACR GENIE Results; MTOR_p.M2327I; B1501
SLAVISMVGY

SEQ ID NO: 25499 - protein, 8 aa, Homo sapiens
  AACR GENIE Results; MTOR_p.M2327I; A2601
AVISMVGY

SEQ ID NO: 25500 - protein, 8 aa, Homo sapiens
  AACR GENIE Results; MTOR_p.M2327I; C0303
ISMVGYIL

SEQ ID NO: 25501 - protein, 9 aa, Homo sapiens
  AACR GENIE Results; MTOR_p.M2387I; A0201
RMLTNAIEV

SEQ ID NO: 25502 - protein, 10 aa, Homo sapiens
  AACR GENIE Results; MTOR_p.M2387I; B1801
IEVTGLDGNY

SEQ ID NO: 25503 - protein, 10 aa, Homo sapiens
  AACR GENIE Results; MTOR_p.M2387I; B4403
IEVTGLDGNY

SEQ ID NO: 25504 - protein, 10 aa, Homo sapiens
  AACR GENIE Results; MTOR_p.R1235W; B4403
EEDPLIYQHW

SEQ ID NO: 25505 - protein, 10 aa, Homo sapiens
  AACR GENIE Results; MTOR_p.R1235W; B4402
EEDPLIYQHW

SEQ ID NO: 25506 - protein, 11 aa, Homo sapiens
  AACR GENIE Results; MTOR_p.R1235W; B4402
EEEDPLIYQHW

SEQ ID NO: 25507 - protein, 11 aa, Homo sapiens
  AACR GENIE Results; MTOR_p.R1235W; B4403
EEEDPLIYQHW

SEQ ID NO: 25508 - protein, 9 aa, Homo sapiens
  AACR GENIE Results; MTOR_p.R1235W; B4402
EDPLIYQHW

SEQ ID NO: 25509 - protein, 9 aa, Homo sapiens
  AACR GENIE Results; MTOR_p.R1235W; B4403
EDPLIYQHW

SEQ ID NO: 25510 - protein, 10 aa, Homo sapiens
  AACR GENIE Results; MTOR_p.R1235W; A2301
EEDPLIYQHW

SEQ ID NO: 25511 - protein, 9 aa, Homo sapiens
  AACR GENIE Results; MTOR_p.S2215Y; A0201
LLANDPTYL

SEQ ID NO: 25512 - protein, 9 aa, Homo sapiens
  AACR GENIE Results; MTOR_p.S2215Y; A3101
LANDPTYLR

SEQ ID NO: 25513 - protein, 9 aa, Homo sapiens
  AACR GENIE Results; MTOR_p.S2215Y; A6801
LANDPTYLR

SEQ ID NO: 25514 - protein, 8 aa, Homo sapiens
  AACR GENIE Results; MTOR_p.S2215Y; C0304
LANDPTYL

SEQ ID NO: 25515 - protein, 10 aa, Homo sapiens
  AACR GENIE Results; MTOR_p.S2215Y; A0201
TLLANDPTYL

SEQ ID NO: 25516 - protein, 9 aa, Homo sapiens
  AACR GENIE Results; MTOR_p.S2215Y; B3501
TLLANDPTY

SEQ ID NO: 25517 - protein, 10 aa, Homo sapiens
  AACR GENIE Results; MTOR_p.S2215Y; A1101
LANDPTYLRK

SEQ ID NO: 25518 - protein, 9 aa, Homo sapiens
  AACR GENIE Results; MTOR_p.S2215Y; B1501
TLLANDPTY

SEQ ID NO: 25519 - protein, 9 aa, Homo sapiens
  AACR GENIE Results; MTOR_p.S2215Y; A1101
ANDPTYLRK

SEQ ID NO: 25520 - protein, 8 aa, Homo sapiens
  AACR GENIE Results; MTOR_p.S2215Y; C0303
LANDPTYL

SEQ ID NO: 25521 - protein, 9 aa, Homo sapiens
  AACR GENIE Results; MTOR_p.S2215Y; B1302
LLANDPTYL

SEQ ID NO: 25522 - protein, 9 aa, Homo sapiens
  AACR GENIE Results; MTOR_p.S2215Y; A2301
TYLRKNLSI

SEQ ID NO: 25523 - protein, 8 aa, Homo sapiens
  AACR GENIE Results; MTOR_p.S2215Y; C0501
LANDPTYL

SEQ ID NO: 25524 - protein, 10 aa, Homo sapiens
  AACR GENIE Results; MTOR_p.S2215Y; A6801
LANDPTYLRK

SEQ ID NO: 25525 - protein, 8 aa, Homo sapiens
  AACR GENIE Results; MTOR_p.S2215Y; C1502
LANDPTYL

SEQ ID NO: 25526 - protein, 8 aa, Homo sapiens
  AACR GENIE Results; MTOR_p.S2215Y; C0202
LANDPTYL

SEQ ID NO: 25527 - protein, 9 aa, Homo sapiens
  AACR GENIE Results; MTOR_p.T1977K; B5101
QALIYPLKV

SEQ ID NO: 25528 - protein, 10 aa, Homo sapiens
  AACR GENIE Results; MTOR_p.T1977K; A0301
LIYPLKVASK

SEQ ID NO: 25529 - protein, 11 aa, Homo sapiens
  AACR GENIE Results; MTOR_p.T1977K; A0301
KVASKSTTTAR

SEQ ID NO: 25530 - protein, 8 aa, Homo sapiens
  AACR GENIE Results; MTOR_p.T1977K; B1302
ALIYPLKV

SEQ ID NO: 25531 - protein, 9 aa, Homo sapiens
  AACR GENIE Results; MTOR_p.T1977K; B1302
QALIYPLKV

SEQ ID NO: 25532 - protein, 9 aa, Homo sapiens
  AACR GENIE Results; MTOR_p.T1977K; C1502
QALIYPLKV

SEQ ID NO: 25533 - protein, 11 aa, Homo sapiens
  AACR GENIE Results; MTOR_p.T1977K; A3101
KVASKSTTTAR

SEQ ID NO: 25534 - protein, 8 aa, Homo sapiens
  AACR GENIE Results; MTOR_p.T1977K; B5101
YPLKVASK

SEQ ID NO: 25535 - protein, 9 aa, Homo sapiens
  AACR GENIE Results; MYBL1_p.A562V; B3503
TPTPFKNVL

SEQ ID NO: 25536 - protein, 9 aa, Homo sapiens
  AACR GENIE Results; MYBL1_p.A562V; B0702
TPTPFKNVL

SEQ ID NO: 25537 - protein, 9 aa, Homo sapiens
  AACR GENIE Results; MYBL1_p.A562V; B5501
TPFKNVLAA

SEQ ID NO: 25538 - protein, 9 aa, Homo sapiens
  AACR GENIE Results; MYBL1_p.A562V; B3501
TPTPFKNVL

SEQ ID NO: 25539 - protein, 9 aa, Homo sapiens
  AACR GENIE Results; MYBL1_p.Q334H; B1501
AQHNSPTKF

SEQ ID NO: 25540 - protein, 10 aa, Homo sapiens
  AACR GENIE Results; MYC_p.S161L; B0702
LPNPARGHSV

SEQ ID NO: 25541 - protein, 9 aa, Homo sapiens
  AACR GENIE Results; MYC_p.S161L; A6801
DSGLPNPAR

SEQ ID NO: 25542 - protein, 10 aa, Homo sapiens
  AACR GENIE Results; MYC_p.S161L; B5101
LPNPARGHSV

SEQ ID NO: 25543 - protein, 10 aa, Homo sapiens
  AACR GENIE Results; MYC_p.S161L; B0801
LPNPARGHSV

SEQ ID NO: 25544 - protein, 11 aa, Homo sapiens
  AACR GENIE Results; MYC_p.S161L; A0201
GLPNPARGHSV

SEQ ID NO: 25545 - protein, 8 aa, Homo sapiens
  AACR GENIE Results; MYD88_p.L265P; C0702
KRPIPIKY

SEQ ID NO: 25546 - protein, 10 aa, Homo sapiens
  AACR GENIE Results; MYOD1_p.C206F; B0702
SPRSNFSDGM

SEQ ID NO: 25547 - protein, 8 aa, Homo sapiens
  AACR GENIE Results; MYOD1_p.C206F; A0101
FSDGMMDY

SEQ ID NO: 25548 - protein, 9 aa, Homo sapiens
  AACR GENIE Results; MYOD1_p.C206F; B5101
DASSPRSNF

SEQ ID NO: 25549 - protein, 9 aa, Homo sapiens
  AACR GENIE Results; MYOD1_p.C206F; B3501
DASSPRSNF

SEQ ID NO: 25550 - protein, 9 aa, Homo sapiens
  AACR GENIE Results; MYOD1_p.C206F; A2601
DASSPRSNF

SEQ ID NO: 25551 - protein, 9 aa, Homo sapiens
  AACR GENIE Results; NBN_p.M152I; A0301
IVSVKVTIK

SEQ ID NO: 25552 - protein, 9 aa, Homo sapiens
  AACR GENIE Results; NBN_p.M152I; A1101
IVSVKVTIK

SEQ ID NO: 25553 - protein, 10 aa, Homo sapiens
  AACR GENIE Results; NF1_p.K296N; A1101
VVDENNMNNK

SEQ ID NO: 25554 - protein, 11 aa, Homo sapiens
  AACR GENIE Results; NF1_p.K296N; A6801
DVVDENNMNNK

SEQ ID NO: 25555 - protein, 10 aa, Homo sapiens
  AACR GENIE Results; NF1_p.K296N; A0301
VVDENNMNNK

SEQ ID NO: 25556 - protein, 9 aa, Homo sapiens
  AACR GENIE Results; NF1_p.K296N; B1801
DENNMNNKL

SEQ ID NO: 25557 - protein, 10 aa, Homo sapiens
  AACR GENIE Results; NF1_p.K296N; B4403
DENNMNNKLF

SEQ ID NO: 25558 - protein, 10 aa, Homo sapiens
  AACR GENIE Results; NF1_p.K296N; B4402
DENNMNNKLF

SEQ ID NO: 25559 - protein, 11 aa, Homo sapiens
  AACR GENIE Results; NF1_p.K296N; C0802
VVDENNMNNKL

SEQ ID NO: 25560 - protein, 9 aa, Homo sapiens
  AACR GENIE Results; NF1_p.Y2285Tfs*5; A2402
KGPDTTVKF

SEQ ID NO: 25561 - protein, 9 aa, Homo sapiens
  AACR GENIE Results; NF1_p.Y2285Tfs*5; B1501
KGPDTTVKF

SEQ ID NO: 25562 - protein, 9 aa, Homo sapiens
  AACR GENIE Results; NF1_p.Y2285Tfs*5; C0102
KGPDTTVKF

SEQ ID NO: 25563 - protein, 9 aa, Homo sapiens
  AACR GENIE Results; NF1_p.Y2285Tfs*5; B5701
KGPDTTVKF

SEQ ID NO: 25564 - protein, 9 aa, Homo sapiens
  AACR GENIE Results; NF1_p.Y2285Tfs*5; C0202
KGPDTTVKF

SEQ ID NO: 25565 - protein, 11 aa, Homo sapiens
  AACR GENIE Results; NF1_p.Y2285Tfs*5; B1501
CLKGPDTTVKF

SEQ ID NO: 25566 - protein, 9 aa, Homo sapiens
  AACR GENIE Results; NF1_p.Y2285Tfs*5; A1101
KGPDTTVKF

SEQ ID NO: 25567 - protein, 8 aa, Homo sapiens
  AACR GENIE Results; NF1_p.Y2285Tfs*5; C0501
GPDTTVKF

SEQ ID NO: 25568 - protein, 9 aa, Homo sapiens
  AACR GENIE Results; NF1_p.Y2285Tfs*5; C0501
KGPDTTVKF

SEQ ID NO: 25569 - protein, 9 aa, Homo sapiens
  AACR GENIE Results; NF2_p.M514V; C0401
SFDFKDTDV

SEQ ID NO: 25570 - protein, 9 aa, Homo sapiens
  AACR GENIE Results; NF2_p.M514V; B0801
DTDVKRLSM

SEQ ID NO: 25571 - protein, 9 aa, Homo sapiens
  AACR GENIE Results; NFE2L2_p.D29N; B2702
QDINLGVSR

SEQ ID NO: 25572 - protein, 10 aa, Homo sapiens
  AACR GENIE Results; NFE2L2_p.D29N; B2702
RQDINLGVSR

SEQ ID NO: 25573 - protein, 9 aa, Homo sapiens
  AACR GENIE Results; NFE2L2_p.D29N; C1502
INLGVSREV

SEQ ID NO: 25574 - protein, 9 aa, Homo sapiens
  AACR GENIE Results; NFE2L2_p.D29N; A0201
ILWRQDINL

SEQ ID NO: 25575 - protein, 9 aa, Homo sapiens
  AACR GENIE Results; NFE2L2_p.D29N; A6801
QDINLGVSR

SEQ ID NO: 25576 - protein, 8 aa, Homo sapiens
  AACR GENIE Results; NFE2L2_p.D29N; A3303
DINLGVSR

SEQ ID NO: 25577 - protein, 8 aa, Homo sapiens
  AACR GENIE Results; NFE2L2_p.D29N; B1302
RQDINLGV

SEQ ID NO: 25578 - protein, 9 aa, Homo sapiens
  AACR GENIE Results; NFE2L2_p.D29N; A3303
QDINLGVSR

SEQ ID NO: 25579 - protein, 10 aa, Homo sapiens
  AACR GENIE Results; NFE2L2_p.D29N; A3101
RQDINLGVSR

SEQ ID NO: 25580 - protein, 8 aa, Homo sapiens
  AACR GENIE Results; NFE2L2_p.D29N; A6801
DINLGVSR

SEQ ID NO: 25581 - protein, 10 aa, Homo sapiens
  AACR GENIE Results; NFE2L2_p.D29N; B2705
RQDINLGVSR

SEQ ID NO: 25582 - protein, 8 aa, Homo sapiens
  AACR GENIE Results; NFE2L2_p.D29N; C0802
RQDINLGV

SEQ ID NO: 25583 - protein, 11 aa, Homo sapiens
  AACR GENIE Results; NFE2L2_p.D29N; B4002
QDINLGVSREV

SEQ ID NO: 25584 - protein, 9 aa, Homo sapiens
  AACR GENIE Results; NFE2L2_p.D29N; A3101
QDINLGVSR

SEQ ID NO: 25585 - protein, 9 aa, Homo sapiens
  AACR GENIE Results; NFE2L2_p.E79K; C0501
QLDEKTGEF

SEQ ID NO: 25586 - protein, 10 aa, Homo sapiens
  AACR GENIE Results; NFE2L2_p.E79K; A0201
QLDEKTGEFL

SEQ ID NO: 25587 - protein, 9 aa, Homo sapiens
  AACR GENIE Results; NFE2L2_p.E79K; A0101
QLDEKTGEF

SEQ ID NO: 25588 - protein, 10 aa, Homo sapiens
  AACR GENIE Results; NFE2L2_p.E79K; C0501
QLDEKTGEFL

SEQ ID NO: 25589 - protein, 9 aa, Homo sapiens
  AACR GENIE Results; NFE2L2_p.G31A; A1101
QDIDLAVSR

SEQ ID NO: 25590 - protein, 8 aa, Homo sapiens
  AACR GENIE Results; NFE2L2_p.G31A; B5101
DLAVSREV

SEQ ID NO: 25591 - protein, 9 aa, Homo sapiens
  AACR GENIE Results; NFE2L2_p.G31A; B1501
AVSREVFDF

SEQ ID NO: 25592 - protein, 9 aa, Homo sapiens
  AACR GENIE Results; NFE2L2_p.G81S; C0802
QLDEETSEF

SEQ ID NO: 25593 - protein, 10 aa, Homo sapiens
  AACR GENIE Results; NFE2L2_p.G81S; C0802
QLDEETSEFL

SEQ ID NO: 25594 - protein, 9 aa, Homo sapiens
  AACR GENIE Results; NFE2L2_p.G81S; C0501
QLDEETSEF

SEQ ID NO: 25595 - protein, 10 aa, Homo sapiens
  AACR GENIE Results; NFE2L2_p.G81S; B1501
LQLDEETSEF

SEQ ID NO: 25596 - protein, 9 aa, Homo sapiens
  AACR GENIE Results; NFE2L2_p.R34Q; B1501
GVSQEVFDF

SEQ ID NO: 25597 - protein, 9 aa, Homo sapiens
  AACR GENIE Results; NFE2L2_p.R34Q; B5101
IDLGVSQEV

SEQ ID NO: 25598 - protein, 9 aa, Homo sapiens
  AACR GENIE Results; NFE2L2_p.R34Q; A0201
IDLGVSQEV

SEQ ID NO: 25599 - protein, 11 aa, Homo sapiens
  AACR GENIE Results; NKX2-1_p.G85Afs*10; B3501
SAVGATATATW

SEQ ID NO: 25600 - protein, 11 aa, Homo sapiens
  AACR GENIE Results; NKX2-1_p.G85Afs*10; B1501
SAVGATATATW

SEQ ID NO: 25601 - protein, 9 aa, Homo sapiens
  AACR GENIE Results; NKX2-1_p.G85Afs*10; C0303
SAVGATATA

SEQ ID NO: 25602 - protein, 11 aa, Homo sapiens
  AACR GENIE Results; NKX2-1_p.G85Afs*10; A2601
SAVGATATATW

SEQ ID NO: 25603 - protein, 9 aa, Homo sapiens
  AACR GENIE Results; NKX2-1_p.G85Afs*10; C0304
SAVGATATA

SEQ ID NO: 25604 - protein, 9 aa, Homo sapiens
  AACR GENIE Results; NKX2-1_p.G85Afs*10; B3501
SAVGATATA

SEQ ID NO: 25605 - protein, 10 aa, Homo sapiens
  AACR GENIE Results; NKX2-1_p.G85Afs*10; B4402
AVGATATATW

SEQ ID NO: 25606 - protein, 10 aa, Homo sapiens
  AACR GENIE Results; NKX2-1_p.G85Afs*10; B4403
AVGATATATW

SEQ ID NO: 25607 - protein, 9 aa, Homo sapiens
  AACR GENIE Results; NKX2-1_p.L17F; B3501
TPFSVSDIF

SEQ ID NO: 25608 - protein, 10 aa, Homo sapiens
  AACR GENIE Results; NKX2-1_p.L17F; B3501
DIFSPLEESY

SEQ ID NO: 25609 - protein, 9 aa, Homo sapiens
  AACR GENIE Results; NKX2-1_p.L17F; B3501
IFSPLEESY

SEQ ID NO: 25610 - protein, 9 aa, Homo sapiens
  AACR GENIE Results; NKX2-1_p.Q204L; A0201
SMIHLTPTL

SEQ ID NO: 25611 - protein, 9 aa, Homo sapiens
  AACR GENIE Results; NKX2-1_p.Q204L; B1501
SMIHLTPTL

SEQ ID NO: 25612 - protein, 9 aa, Homo sapiens
  AACR GENIE Results; NKX2-1_p.Q204L; C1203
LTPTLVKIW

SEQ ID NO: 25613 - protein, 10 aa, Homo sapiens
  AACR GENIE Results; NKX2-1_p.R178Q; A0301
QVYELEQRFK

SEQ ID NO: 25614 - protein, 9 aa, Homo sapiens
  AACR GENIE Results; NKX2-1_p.R178Q; B1501
QVYELEQRF

SEQ ID NO: 25615 - protein, 9 aa, Homo sapiens
  AACR GENIE Results; NKX2-1_p.R178Q; B3501
QVYELEQRF

SEQ ID NO: 25616 - protein, 10 aa, Homo sapiens
  AACR GENIE Results; NKX2-1_p.R178Q; A1101
QVYELEQRFK

SEQ ID NO: 25617 - protein, 9 aa, Homo sapiens
  AACR GENIE Results; NKX2-1_p.R178Q; C0602
QRFKQQKYL

SEQ ID NO: 25618 - protein, 10 aa, Homo sapiens
  AACR GENIE Results; NKX2-1_p.R178Q; B1501
AQVYELEQRF

SEQ ID NO: 25619 - protein, 9 aa, Homo sapiens
  AACR GENIE Results; NKX2-1_p.R178Q; B4403
QVYELEQRF

SEQ ID NO: 25620 - protein, 9 aa, Homo sapiens
  AACR GENIE Results; NKX2-1_p.R178Q; A2601
QVYELEQRF

SEQ ID NO: 25621 - protein, 9 aa, Homo sapiens
  AACR GENIE Results; NOTCH1_p.A2077T; A2402
SYETTKVLL

SEQ ID NO: 25622 - protein, 9 aa, Homo sapiens
  AACR GENIE Results; NOTCH1_p.A2077T; B5701
TTKVLLDHF

SEQ ID NO: 25623 - protein, 8 aa, Homo sapiens
  AACR GENIE Results; NOTCH1_p.A2077T; B4001
YETTKVLL

SEQ ID NO: 25624 - protein, 8 aa, Homo sapiens
  AACR GENIE Results; NOTCH1_p.A2077T; B4002
YETTKVLL

SEQ ID NO: 25625 - protein, 9 aa, Homo sapiens
  AACR GENIE Results; NOTCH1_p.A2077T; A2301
SYETTKVLL

SEQ ID NO: 25626 - protein, 10 aa, Homo sapiens
  AACR GENIE Results; NOTCH1_p.A2077T; A6802
ETTKVLLDHF

SEQ ID NO: 25627 - protein, 8 aa, Homo sapiens
  AACR GENIE Results; NOTCH1_p.A2077T; B4901
YETTKVLL

SEQ ID NO: 25628 - protein, 11 aa, Homo sapiens
  AACR GENIE Results; NOTCH1_p.A2077T; A6802
ETTKVLLDHFA

SEQ ID NO: 25629 - protein, 8 aa, Homo sapiens
  AACR GENIE Results; NOTCH1_p.A2077T; B3701
YETTKVLL

SEQ ID NO: 25630 - protein, 11 aa, Homo sapiens
  AACR GENIE Results; NOTCH1_p.A2077T; B4002
REGSYETTKVL

SEQ ID NO: 25631 - protein, 9 aa, Homo sapiens
  AACR GENIE Results; NOTCH1_p.A2077T; C0401
SYETTKVLL

SEQ ID NO: 25632 - protein, 9 aa, Homo sapiens
  AACR GENIE Results; NOTCH1_p.A2077T; B5801
GSYETTKVL

SEQ ID NO: 25633 - protein, 11 aa, Homo sapiens
  AACR GENIE Results; NOTCH1_p.G1788S; B4001
REPLSEDSVGL

SEQ ID NO: 25634 - protein, 10 aa, Homo sapiens
  AACR GENIE Results; NOTCH1_p.G1788S; B4001
SEDSVGLKPL

SEQ ID NO: 25635 - protein, 9 aa, Homo sapiens
  AACR GENIE Results; NOTCH1_p.S2467L; B4001
QESPALPTL

SEQ ID NO: 25636 - protein, 9 aa, Homo sapiens
  AACR GENIE Results; NOTCH1_p.S2467L; B4403
QESPALPTL

SEQ ID NO: 25637 - protein, 10 aa, Homo sapiens
  AACR GENIE Results; NOTCH1_p.S2467L; B4001
QESPALPTLL

SEQ ID NO: 25638 - protein, 9 aa, Homo sapiens
  AACR GENIE Results; NOTCH1_p.S2467L; B4402
QESPALPTL

SEQ ID NO: 25639 - protein, 9 aa, Homo sapiens
  AACR GENIE Results; NOTCH1_p.S2467L; B3501
LPTLLPSSL

SEQ ID NO: 25640 - protein, 9 aa, Homo sapiens
  AACR GENIE Results; NOTCH2_p.R2347H; B3501
MAHLPSVAF

SEQ ID NO: 25641 - protein, 9 aa, Homo sapiens
  AACR GENIE Results; NOTCH2_p.R2347H; B1501
MAHLPSVAF

SEQ ID NO: 25642 - protein, 9 aa, Homo sapiens
  AACR GENIE Results; NOTCH2_p.R2347H; C0304
MAHLPSVAF

SEQ ID NO: 25643 - protein, 9 aa, Homo sapiens
  AACR GENIE Results; NOTCH2_p.R2347H; C0303
MAHLPSVAF

SEQ ID NO: 25644 - protein, 9 aa, Homo sapiens
  AACR GENIE Results; NOTCH3_p.P2033S; B0702
QPSGPRSSP

SEQ ID NO: 25645 - protein, 10 aa, Homo sapiens
  AACR GENIE Results; NOTCH3_p.R1834W; C0802
WTDRTGETAL

SEQ ID NO: 25646 - protein, 10 aa, Homo sapiens
  AACR GENIE Results; NRAS_p.E62K; A0101
ILDTAGQKEY

SEQ ID NO: 25647 - protein, 10 aa, Homo sapiens
  AACR GENIE Results; NRAS_p.E62K; C0302
ILDTAGQKEY

SEQ ID NO: 25648 - protein, 9 aa, Homo sapiens
  AACR GENIE Results; NRAS_p.E62K; A3101
GQKEYSAMR

SEQ ID NO: 25649 - protein, 11 aa, Homo sapiens
  AACR GENIE Results; NRAS_p.E62K; A2601
DTAGQKEYSAM

SEQ ID NO: 25650 - protein, 10 aa, Homo sapiens
  AACR GENIE Results; NRAS_p.E62K; B1501
ILDTAGQKEY

SEQ ID NO: 25651 - protein, 10 aa, Homo sapiens
  AACR GENIE Results; NRAS_p.E62K; B5801
ILDTAGQKEY

SEQ ID NO: 25652 - protein, 8 aa, Homo sapiens
  AACR GENIE Results; NRAS_p.E62K; B1501
GQKEYSAM

SEQ ID NO: 25653 - protein, 11 aa, Homo sapiens
  AACR GENIE Results; NRAS_p.E62K; A2601
DILDTAGQKEY

SEQ ID NO: 25654 - protein, 11 aa, Homo sapiens
  AACR GENIE Results; NRAS_p.E62K; B1502
DILDTAGQKEY

SEQ ID NO: 25655 - protein, 10 aa, Homo sapiens
  AACR GENIE Results; NRAS_p.E62K; B1502
ILDTAGQKEY

SEQ ID NO: 25656 - protein, 10 aa, Homo sapiens
  AACR GENIE Results; NRAS_p.E62K; B4403
KEYSAMRDQY

SEQ ID NO: 25657 - protein, 9 aa, Homo sapiens
  AACR GENIE Results; NRAS_p.E62K; C1602
LDTAGQKEY

SEQ ID NO: 25658 - protein, 11 aa, Homo sapiens
  AACR GENIE Results; NRAS_p.E62K; A6801
DILDTAGQKEY

SEQ ID NO: 25659 - protein, 10 aa, Homo sapiens
  AACR GENIE Results; NRAS_p.E62K; B4601
ILDTAGQKEY

SEQ ID NO: 25660 - protein, 10 aa, Homo sapiens
  AACR GENIE Results; NRAS_p.E62K; B3901
ILDTAGQKEY

SEQ ID NO: 25661 - protein, 10 aa, Homo sapiens
  AACR GENIE Results; NRAS_p.E62K; A2902
ILDTAGQKEY

SEQ ID NO: 25662 - protein, 10 aa, Homo sapiens
  AACR GENIE Results; NRAS_p.E62K; C0802
ILDTAGQKEY

SEQ ID NO: 25663 - protein, 9 aa, Homo sapiens
  AACR GENIE Results; NRAS_p.E62K; B3906
TAGQKEYSA

SEQ ID NO: 25664 - protein, 10 aa, Homo sapiens
  AACR GENIE Results; NRAS_p.E62K; A3002
ILDTAGQKEY

SEQ ID NO: 25665 - protein, 10 aa, Homo sapiens
  AACR GENIE Results; NRAS_p.E62K; A0201
ILDTAGQKEY

SEQ ID NO: 25666 - protein, 10 aa, Homo sapiens
  AACR GENIE Results; NRAS_p.E62K; B4403
ILDTAGQKEY

SEQ ID NO: 25667 - protein, 8 aa, Homo sapiens
  AACR GENIE Results; NRAS_p.E62K; A2601
DTAGQKEY

SEQ ID NO: 25668 - protein, 11 aa, Homo sapiens
  AACR GENIE Results; NRAS_p.E62K; B3501
DILDTAGQKEY

SEQ ID NO: 25669 - protein, 11 aa, Homo sapiens
  AACR GENIE Results; NRAS_p.E62K; B5801
DILDTAGQKEY

SEQ ID NO: 25670 - protein, 10 aa, Homo sapiens
  AACR GENIE Results; NRAS_p.E62K; A2901
ILDTAGQKEY

SEQ ID NO: 25671 - protein, 11 aa, Homo sapiens
  AACR GENIE Results; NRAS_p.E62K; B4403
DILDTAGQKEY

SEQ ID NO: 25672 - protein, 10 aa, Homo sapiens
  AACR GENIE Results; NRAS_p.E62K; C0801
ILDTAGQKEY

SEQ ID NO: 25673 - protein, 9 aa, Homo sapiens
  AACR GENIE Results; NRAS_p.E62K; B4403
LDTAGQKEY

SEQ ID NO: 25674 - protein, 11 aa, Homo sapiens
  AACR GENIE Results; NRAS_p.E62K; B2702
DILDTAGQKEY

SEQ ID NO: 25675 - protein, 11 aa, Homo sapiens
  AACR GENIE Results; NRAS_p.E62K; A3301
DILDTAGQKEY

SEQ ID NO: 25676 - protein, 10 aa, Homo sapiens
  AACR GENIE Results; NRAS_p.E62K; A6802
DTAGQKEYSA

SEQ ID NO: 25677 - protein, 10 aa, Homo sapiens
  AACR GENIE Results; NRAS_p.E62K; B4402
ILDTAGQKEY

SEQ ID NO: 25678 - protein, 9 aa, Homo sapiens
  AACR GENIE Results; NRAS_p.E62K; A6801
DILDTAGQK

SEQ ID NO: 25679 - protein, 10 aa, Homo sapiens
  AACR GENIE Results; NRAS_p.E62K; B4402
KEYSAMRDQY

SEQ ID NO: 25680 - protein, 10 aa, Homo sapiens
  AACR GENIE Results; NRAS_p.G12C; A1101
VVVGACGVGK

SEQ ID NO: 25681 - protein, 9 aa, Homo sapiens
  AACR GENIE Results; NRAS_p.G12C; A1101
VVGACGVGK

SEQ ID NO: 25682 - protein, 10 aa, Homo sapiens
  AACR GENIE Results; NRAS_p.G12C; A0301
VVVGACGVGK

SEQ ID NO: 25683 - protein, 9 aa, Homo sapiens
  AACR GENIE Results; NRAS_p.G12C; A0301
VVGACGVGK

SEQ ID NO: 25684 - protein, 10 aa, Homo sapiens
  AACR GENIE Results; NRAS_p.G12C; A6801
VVVGACGVGK

SEQ ID NO: 25685 - protein, 9 aa, Homo sapiens
  AACR GENIE Results; NRAS_p.G12C; C0102
ACGVGKSAL

SEQ ID NO: 25686 - protein, 9 aa, Homo sapiens
  AACR GENIE Results; NRAS_p.G12C; B0702
ACGVGKSAL

SEQ ID NO: 25687 - protein, 10 aa, Homo sapiens
  AACR GENIE Results; NRAS_p.G12C; B2702
VVVGACGVGK

SEQ ID NO: 25688 - protein, 10 aa, Homo sapiens
  AACR GENIE Results; NRAS_p.G12C; B0702
GACGVGKSAL

SEQ ID NO: 25689 - protein, 8 aa, Homo sapiens
  AACR GENIE Results; NRAS_p.G12C; B0801
CGVGKSAL

SEQ ID NO: 25690 - protein, 10 aa, Homo sapiens
  AACR GENIE Results; NRAS_p.G12C; C0304
GACGVGKSAL

SEQ ID NO: 25691 - protein, 8 aa, Homo sapiens
  AACR GENIE Results; NRAS_p.G12D; B1402
DGVGKSAL

SEQ ID NO: 25692 - protein, 10 aa, Homo sapiens
  AACR GENIE Results; NRAS_p.G12D; A1101
VVVGADGVGK

SEQ ID NO: 25693 - protein, 10 aa, Homo sapiens
  AACR GENIE Results; NRAS_p.G12D; C0802
GADGVGKSAL

SEQ ID NO: 25694 - protein, 8 aa, Homo sapiens
  AACR GENIE Results; NRAS_p.G12D; B0801
DGVGKSAL

SEQ ID NO: 25695 - protein, 11 aa, Homo sapiens
  AACR GENIE Results; NRAS_p.G12D; B2702
LVVVGADGVGK

SEQ ID NO: 25696 - protein, 9 aa, Homo sapiens
  AACR GENIE Results; NRAS_p.G12D; A1101
VVGADGVGK

SEQ ID NO: 25697 - protein, 10 aa, Homo sapiens
  AACR GENIE Results; NRAS_p.G12D; A6801
VVVGADGVGK

SEQ ID NO: 25698 - protein, 9 aa, Homo sapiens
  AACR GENIE Results; NRAS_p.G12D; B3701
ADGVGKSAL

SEQ ID NO: 25699 - protein, 8 aa, Homo sapiens
  AACR GENIE Results; NRAS_p.G12D; B1401
DGVGKSAL

SEQ ID NO: 25700 - protein, 9 aa, Homo sapiens
  AACR GENIE Results; NRAS_p.G12D; B0702
ADGVGKSAL

SEQ ID NO: 25701 - protein, 11 aa, Homo sapiens
  AACR GENIE Results; NRAS_p.G12D; B0801
VGADGVGKSAL

SEQ ID NO: 25702 - protein, 10 aa, Homo sapiens
  AACR GENIE Results; NRAS_p.G12D; B5101
DGVGKSALTI

SEQ ID NO: 25703 - protein, 10 aa, Homo sapiens
  AACR GENIE Results; NRAS_p.G12D; B3502
GADGVGKSAL

SEQ ID NO: 25704 - protein, 10 aa, Homo sapiens
  AACR GENIE Results; NRAS_p.G12D; B4001
GADGVGKSAL

SEQ ID NO: 25705 - protein, 10 aa, Homo sapiens
  AACR GENIE Results; NRAS_p.G12D; B2702
VVVGADGVGK

SEQ ID NO: 25706 - protein, 9 aa, Homo sapiens
  AACR GENIE Results; NRAS_p.G12D; A0206
LVVVGADGV

SEQ ID NO: 25707 - protein, 9 aa, Homo sapiens
  AACR GENIE Results; NRAS_p.G12D; B4002
ADGVGKSAL

SEQ ID NO: 25708 - protein, 10 aa, Homo sapiens
  AACR GENIE Results; NRAS_p.G12D; A0301
VVVGADGVGK

SEQ ID NO: 25709 - protein, 10 aa, Homo sapiens
  AACR GENIE Results; NRAS_p.G12D; C0501
GADGVGKSAL

SEQ ID NO: 25710 - protein, 10 aa, Homo sapiens
  AACR GENIE Results; NRAS_p.G12D; C0801
GADGVGKSAL

SEQ ID NO: 25711 - protein, 11 aa, Homo sapiens
  AACR GENIE Results; NRAS_p.G12D; A0206
VVVGADGVGKS

SEQ ID NO: 25712 - protein, 10 aa, Homo sapiens
  AACR GENIE Results; NRAS_p.G12D; B0702
GADGVGKSAL

SEQ ID NO: 25713 - protein, 11 aa, Homo sapiens
  AACR GENIE Results; NRAS_p.G12D; A1101
LVVVGADGVGK

SEQ ID NO: 25714 - protein, 10 aa, Homo sapiens
  AACR GENIE Results; NRAS_p.G12D; A0206
KLVVVGADGV

SEQ ID NO: 25715 - protein, 9 aa, Homo sapiens
  AACR GENIE Results; NRAS_p.G12D; A0205
LVVVGADGV

SEQ ID NO: 25716 - protein, 10 aa, Homo sapiens
  AACR GENIE Results; NRAS_p.G12D; A0201
KLVVVGADGV

SEQ ID NO: 25717 - protein, 11 aa, Homo sapiens
  AACR GENIE Results; NRAS_p.G12D; A2601
VVVGADGVGKS

SEQ ID NO: 25718 - protein, 10 aa, Homo sapiens
  AACR GENIE Results; NRAS_p.G12D; B1302
KLVVVGADGV

SEQ ID NO: 25719 - protein, 10 aa, Homo sapiens
  AACR GENIE Results; NRAS_p.G12D; C0102
GADGVGKSAL

SEQ ID NO: 25720 - protein, 11 aa, Homo sapiens
  AACR GENIE Results; NRAS_p.G12D; A1101
VVVGADGVGKS

SEQ ID NO: 25721 - protein, 11 aa, Homo sapiens
  AACR GENIE Results; NRAS_p.G12D; B3901
VGADGVGKSAL

SEQ ID NO: 25722 - protein, 10 aa, Homo sapiens
  AACR GENIE Results; NRAS_p.G12D; B3503
GADGVGKSAL

SEQ ID NO: 25723 - protein, 11 aa, Homo sapiens
  AACR GENIE Results; NRAS_p.G12D; A6801
VVVGADGVGKS

SEQ ID NO: 25724 - protein, 10 aa, Homo sapiens
  AACR GENIE Results; NRAS_p.G12D; C0304
GADGVGKSAL

SEQ ID NO: 25725 - protein, 10 aa, Homo sapiens
  AACR GENIE Results; NRAS_p.G12D; A0205
VGADGVGKSA

SEQ ID NO: 25726 - protein, 9 aa, Homo sapiens
  AACR GENIE Results; NRAS_p.G12D; A0301
VVGADGVGK

SEQ ID NO: 25727 - protein, 9 aa, Homo sapiens
  AACR GENIE Results; NRAS_p.G12V; A1101
VVGAVGVGK

SEQ ID NO: 25728 - protein, 9 aa, Homo sapiens
  AACR GENIE Results; NRAS_p.G12V; A0301
VVGAVGVGK

SEQ ID NO: 25729 - protein, 10 aa, Homo sapiens
  AACR GENIE Results; NRAS_p.G12V; A1101
VVVGAVGVGK

SEQ ID NO: 25730 - protein, 10 aa, Homo sapiens
  AACR GENIE Results; NRAS_p.G12V; A6801
VVVGAVGVGK

SEQ ID NO: 25731 - protein, 9 aa, Homo sapiens
  AACR GENIE Results; NRAS_p.G12V; C0102
AVGVGKSAL

SEQ ID NO: 25732 - protein, 10 aa, Homo sapiens
  AACR GENIE Results; NRAS_p.G12V; A0301
VVVGAVGVGK

SEQ ID NO: 25733 - protein, 9 aa, Homo sapiens
  AACR GENIE Results; NRAS_p.G12V; A6801
VVGAVGVGK

SEQ ID NO: 25734 - protein, 9 aa, Homo sapiens
  AACR GENIE Results; NRAS_p.G12V; B0702
AVGVGKSAL

SEQ ID NO: 25735 - protein, 11 aa, Homo sapiens
  AACR GENIE Results; NRAS_p.G12V; B2702
LVVVGAVGVGK

SEQ ID NO: 25736 - protein, 9 aa, Homo sapiens
  AACR GENIE Results; NRAS_p.G12V; B2702
VVGAVGVGK

SEQ ID NO: 25737 - protein, 8 aa, Homo sapiens
  AACR GENIE Results; NRAS_p.G12V; B0801
VGVGKSAL

SEQ ID NO: 25738 - protein, 11 aa, Homo sapiens
  AACR GENIE Results; NRAS_p.G12V; B0801
VGAVGVGKSAL

SEQ ID NO: 25739 - protein, 10 aa, Homo sapiens
  AACR GENIE Results; NRAS_p.G12V; B2702
VVVGAVGVGK

SEQ ID NO: 25740 - protein, 11 aa, Homo sapiens
  AACR GENIE Results; NRAS_p.G12V; C0704
VVVGAVGVGKS

SEQ ID NO: 25741 - protein, 10 aa, Homo sapiens
  AACR GENIE Results; NRAS_p.G12V; A0201
KLVVVGAVGV

SEQ ID NO: 25742 - protein, 10 aa, Homo sapiens
  AACR GENIE Results; NRAS_p.G12V; C0304
GAVGVGKSAL

SEQ ID NO: 25743 - protein, 10 aa, Homo sapiens
  AACR GENIE Results; NRAS_p.G12V; B4001
GAVGVGKSAL

SEQ ID NO: 25744 - protein, 8 aa, Homo sapiens
  AACR GENIE Results; NRAS_p.G12V; B1402
VGVGKSAL

SEQ ID NO: 25745 - protein, 9 aa, Homo sapiens
  AACR GENIE Results; NRAS_p.G12V; B1501
AVGVGKSAL

SEQ ID NO: 25746 - protein, 8 aa, Homo sapiens
  AACR GENIE Results; NRAS_p.G12V; B1302
VVVGAVGV

SEQ ID NO: 25747 - protein, 9 aa, Homo sapiens
  AACR GENIE Results; NRAS_p.G12V; A3101
VVGAVGVGK

SEQ ID NO: 25748 - protein, 10 aa, Homo sapiens
  AACR GENIE Results; NRAS_p.G12V; A6802
VVVGAVGVGK

SEQ ID NO: 25749 - protein, 11 aa, Homo sapiens
  AACR GENIE Results; NRAS_p.G12V; A6801
LVVVGAVGVGK

SEQ ID NO: 25750 - protein, 10 aa, Homo sapiens
  AACR GENIE Results; NRAS_p.G12V; B4002
GAVGVGKSAL

SEQ ID NO: 25751 - protein, 10 aa, Homo sapiens
  AACR GENIE Results; NRAS_p.G12V; B1302
VGVGKSALTI

SEQ ID NO: 25752 - protein, 9 aa, Homo sapiens
  AACR GENIE Results; NRAS_p.G12V; B0801
AVGVGKSAL

SEQ ID NO: 25753 - protein, 10 aa, Homo sapiens
  AACR GENIE Results; NRAS_p.G12V; C0303
GAVGVGKSAL

SEQ ID NO: 25754 - protein, 11 aa, Homo sapiens
  AACR GENIE Results; NRAS_p.G12V; A1101
LVVVGAVGVGK

SEQ ID NO: 25755 - protein, 8 aa, Homo sapiens
  AACR GENIE Results; NRAS_p.G12V; B1302
KLVVVGAV

SEQ ID NO: 25756 - protein, 10 aa, Homo sapiens
  AACR GENIE Results; NRAS_p.G12V; B0702
GAVGVGKSAL

SEQ ID NO: 25757 - protein, 9 aa, Homo sapiens
  AACR GENIE Results; NRAS_p.G12V; A3303
VVGAVGVGK

SEQ ID NO: 25758 - protein, 11 aa, Homo sapiens
  AACR GENIE Results; NRAS_p.G12V; A2601
VVVGAVGVGKS

SEQ ID NO: 25759 - protein, 10 aa, Homo sapiens
  AACR GENIE Results; NRAS_p.G12V; B1501
GAVGVGKSAL

SEQ ID NO: 25760 - protein, 10 aa, Homo sapiens
  AACR GENIE Results; NRAS_p.G12V; A3101
VVVGAVGVGK

SEQ ID NO: 25761 - protein, 9 aa, Homo sapiens
  AACR GENIE Results; NRAS_p.G12V; A6802
LVVVGAVGV

SEQ ID NO: 25762 - protein, 9 aa, Homo sapiens
  AACR GENIE Results; NRAS_p.G12V; C0304
GAVGVGKSA

SEQ ID NO: 25763 - protein, 8 aa, Homo sapiens
  AACR GENIE Results; NRAS_p.G12V; A1101
VGAVGVGK

SEQ ID NO: 25764 - protein, 11 aa, Homo sapiens
  AACR GENIE Results; NRAS_p.G12V; A6801
VVVGAVGVGKS

SEQ ID NO: 25765 - protein, 10 aa, Homo sapiens
  AACR GENIE Results; NRAS_p.G12V; A3001
VVVGAVGVGK

SEQ ID NO: 25766 - protein, 11 aa, Homo sapiens
  AACR GENIE Results; NRAS_p.G12V; A0301
LVVVGAVGVGK

SEQ ID NO: 25767 - protein, 10 aa, Homo sapiens
  AACR GENIE Results; NRAS_p.G12V; A3303
VVVGAVGVGK

SEQ ID NO: 25768 - protein, 8 aa, Homo sapiens
  AACR GENIE Results; NRAS_p.G12V; B0702
VGVGKSAL

SEQ ID NO: 25769 - protein, 8 aa, Homo sapiens
  AACR GENIE Results; NRAS_p.G12V; B4002
VVVGAVGV

SEQ ID NO: 25770 - protein, 8 aa, Homo sapiens
  AACR GENIE Results; NRAS_p.G12V; A0301
VGAVGVGK

SEQ ID NO: 25771 - protein, 10 aa, Homo sapiens
  AACR GENIE Results; NRAS_p.G13C; A1101
VVVGAGCVGK

SEQ ID NO: 25772 - protein, 9 aa, Homo sapiens
  AACR GENIE Results; NRAS_p.G13C; A1101
VVGAGCVGK

SEQ ID NO: 25773 - protein, 10 aa, Homo sapiens
  AACR GENIE Results; NRAS_p.G13C; A6801
VVVGAGCVGK

SEQ ID NO: 25774 - protein, 10 aa, Homo sapiens
  AACR GENIE Results; NRAS_p.G13C; A0301
VVVGAGCVGK

SEQ ID NO: 25775 - protein, 9 aa, Homo sapiens
  AACR GENIE Results; NRAS_p.G13C; B0801
AGCVGKSAL

SEQ ID NO: 25776 - protein, 9 aa, Homo sapiens
  AACR GENIE Results; NRAS_p.G13C; A0301
VVGAGCVGK

SEQ ID NO: 25777 - protein, 9 aa, Homo sapiens
  AACR GENIE Results; NRAS_p.G13C; B0702
AGCVGKSAL

SEQ ID NO: 25778 - protein, 9 aa, Homo sapiens
  AACR GENIE Results; NRAS_p.G13D; C0802
AGDVGKSAL

SEQ ID NO: 25779 - protein, 10 aa, Homo sapiens
  AACR GENIE Results; NRAS_p.G13D; A6801
VVVGAGDVGK

SEQ ID NO: 25780 - protein, 11 aa, Homo sapiens
  AACR GENIE Results; NRAS_p.G13D; C0704
VVVGAGDVGKS

SEQ ID NO: 25781 - protein, 8 aa, Homo sapiens
  AACR GENIE Results; NRAS_p.G13D; B4002
GDVGKSAL

SEQ ID NO: 25782 - protein, 10 aa, Homo sapiens
  AACR GENIE Results; NRAS_p.G13D; A1101
VVVGAGDVGK

SEQ ID NO: 25783 - protein, 11 aa, Homo sapiens
  AACR GENIE Results; NRAS_p.G13D; B2702
LVVVGAGDVGK

SEQ ID NO: 25784 - protein, 9 aa, Homo sapiens
  AACR GENIE Results; NRAS_p.G13D; B5101
DVGKSALTI

SEQ ID NO: 25785 - protein, 10 aa, Homo sapiens
  AACR GENIE Results; NRAS_p.G13D; B2702
VVVGAGDVGK

SEQ ID NO: 25786 - protein, 9 aa, Homo sapiens
  AACR GENIE Results; NRAS_p.G13D; A1101
VVGAGDVGK

SEQ ID NO: 25787 - protein, 9 aa, Homo sapiens
  AACR GENIE Results; NRAS_p.G13D; C0501
AGDVGKSAL

SEQ ID NO: 25788 - protein, 9 aa, Homo sapiens
  AACR GENIE Results; NRAS_p.G13D; B0702
AGDVGKSAL

SEQ ID NO: 25789 - protein, 8 aa, Homo sapiens
  AACR GENIE Results; NRAS_p.G13D; B0702
GDVGKSAL

SEQ ID NO: 25790 - protein, 10 aa, Homo sapiens
  AACR GENIE Results; NRAS_p.G13D; B4002
GDVGKSALTI

SEQ ID NO: 25791 - protein, 11 aa, Homo sapiens
  AACR GENIE Results; NRAS_p.G13D; A6801
LVVVGAGDVGK

SEQ ID NO: 25792 - protein, 10 aa, Homo sapiens
  AACR GENIE Results; NRAS_p.G13D; B1302
GDVGKSALTI

SEQ ID NO: 25793 - protein, 10 aa, Homo sapiens
  AACR GENIE Results; NRAS_p.G13D; B0702
GAGDVGKSAL

SEQ ID NO: 25794 - protein, 9 aa, Homo sapiens
  AACR GENIE Results; NRAS_p.G13D; C0304
AGDVGKSAL

SEQ ID NO: 25795 - protein, 9 aa, Homo sapiens
  AACR GENIE Results; NRAS_p.G13D; A6801
VVGAGDVGK

SEQ ID NO: 25796 - protein, 10 aa, Homo sapiens
  AACR GENIE Results; NRAS_p.G13D; A6802
VVVGAGDVGK

SEQ ID NO: 25797 - protein, 11 aa, Homo sapiens
  AACR GENIE Results; NRAS_p.G13D; A1101
LVVVGAGDVGK

SEQ ID NO: 25798 - protein, 9 aa, Homo sapiens
  AACR GENIE Results; NRAS_p.G13D; B3502
AGDVGKSAL

SEQ ID NO: 25799 - protein, 11 aa, Homo sapiens
  AACR GENIE Results; NRAS_p.G13D; A2601
VVVGAGDVGKS

SEQ ID NO: 25800 - protein, 11 aa, Homo sapiens
  AACR GENIE Results; NRAS_p.G13D; B0801
VGAGDVGKSAL

SEQ ID NO: 25801 - protein, 11 aa, Homo sapiens
  AACR GENIE Results; NRAS_p.G13R; A3303
EYKLVVVGAGR

SEQ ID NO: 25802 - protein, 10 aa, Homo sapiens
  AACR GENIE Results; NRAS_p.G13R; A1101
VVVGAGRVGK

SEQ ID NO: 25803 - protein, 9 aa, Homo sapiens
  AACR GENIE Results; NRAS_p.G13R; A1101
VVGAGRVGK

SEQ ID NO: 25804 - protein, 10 aa, Homo sapiens
  AACR GENIE Results; NRAS_p.G13R; A0301
VVVGAGRVGK

SEQ ID NO: 25805 - protein, 9 aa, Homo sapiens
  AACR GENIE Results; NRAS_p.G13R; B0702
AGRVGKSAL

SEQ ID NO: 25806 - protein, 10 aa, Homo sapiens
  AACR GENIE Results; NRAS_p.G13R; A6801
VVVGAGRVGK

SEQ ID NO: 25807 - protein, 9 aa, Homo sapiens
  AACR GENIE Results; NRAS_p.G13R; A0301
VVGAGRVGK

SEQ ID NO: 25808 - protein, 9 aa, Homo sapiens
  AACR GENIE Results; NRAS_p.G13R; A3101
KLVVVGAGR

SEQ ID NO: 25809 - protein, 9 aa, Homo sapiens
  AACR GENIE Results; NRAS_p.G13R; B1302
RVGKSALTI

SEQ ID NO: 25810 - protein, 9 aa, Homo sapiens
  AACR GENIE Results; NRAS_p.G13R; B0801
AGRVGKSAL

SEQ ID NO: 25811 - protein, 10 aa, Homo sapiens
  AACR GENIE Results; NRAS_p.G13R; B5701
VVVGAGRVGK

SEQ ID NO: 25812 - protein, 10 aa, Homo sapiens
  AACR GENIE Results; NRAS_p.Q61H; A0101
ILDTAGHEEY

SEQ ID NO: 25813 - protein, 10 aa, Homo sapiens
  AACR GENIE Results; NRAS_p.Q61H; B1501
ILDTAGHEEY

SEQ ID NO: 25814 - protein, 11 aa, Homo sapiens
  AACR GENIE Results; NRAS_p.Q61H; B3501
DILDTAGHEEY

SEQ ID NO: 25815 - protein, 11 aa, Homo sapiens
  AACR GENIE Results; NRAS_p.Q61H; A2601
DTAGHEEYSAM

SEQ ID NO: 25816 - protein, 11 aa, Homo sapiens
  AACR GENIE Results; NRAS_p.Q61H; A2601
DILDTAGHEEY

SEQ ID NO: 25817 - protein, 11 aa, Homo sapiens
  AACR GENIE Results; NRAS_p.Q61H; B2702
DILDTAGHEEY

SEQ ID NO: 25818 - protein, 9 aa, Homo sapiens
  AACR GENIE Results; NRAS_p.Q61H; B3501
LDTAGHEEY

SEQ ID NO: 25819 - protein, 10 aa, Homo sapiens
  AACR GENIE Results; NRAS_p.Q61H; A2902
ILDTAGHEEY

SEQ ID NO: 25820 - protein, 10 aa, Homo sapiens
  AACR GENIE Results; NRAS_p.Q61H; B3901
ILDTAGHEEY

SEQ ID NO: 25821 - protein, 10 aa, Homo sapiens
  AACR GENIE Results; NRAS_p.Q61H; B3501
ILDTAGHEEY

SEQ ID NO: 25822 - protein, 9 aa, Homo sapiens
  AACR GENIE Results; NRAS_p.Q61H; B1801
LDTAGHEEY

SEQ ID NO: 25823 - protein, 8 aa, Homo sapiens
  AACR GENIE Results; NRAS_p.Q61H; A2601
DTAGHEEY

SEQ ID NO: 25824 - protein, 10 aa, Homo sapiens
  AACR GENIE Results; NRAS_p.Q61H; C0802
ILDTAGHEEY

SEQ ID NO: 25825 - protein, 9 aa, Homo sapiens
  AACR GENIE Results; NRAS_p.Q61H; B2702
LDTAGHEEY

SEQ ID NO: 25826 - protein, 10 aa, Homo sapiens
  AACR GENIE Results; NRAS_p.Q61H; B2702
ILDTAGHEEY

SEQ ID NO: 25827 - protein, 9 aa, Homo sapiens
  AACR GENIE Results; NRAS_p.Q61H; A0101
LDTAGHEEY

SEQ ID NO: 25828 - protein, 11 aa, Homo sapiens
  AACR GENIE Results; NRAS_p.Q61H; A2902
DILDTAGHEEY

SEQ ID NO: 25829 - protein, 9 aa, Homo sapiens
  AACR GENIE Results; NRAS_p.Q61H; B1501
LDTAGHEEY

SEQ ID NO: 25830 - protein, 11 aa, Homo sapiens
  AACR GENIE Results; NRAS_p.Q61H; B0801
DILDTAGHEEY

SEQ ID NO: 25831 - protein, 11 aa, Homo sapiens
  AACR GENIE Results; NRAS_p.Q61H; B1501
DILDTAGHEEY

SEQ ID NO: 25832 - protein, 11 aa, Homo sapiens
  AACR GENIE Results; NRAS_p.Q61H; A6801
DILDTAGHEEY

SEQ ID NO: 25833 - protein, 8 aa, Homo sapiens
  AACR GENIE Results; NRAS_p.Q61H; B3901
DTAGHEEY

SEQ ID NO: 25834 - protein, 10 aa, Homo sapiens
  AACR GENIE Results; NRAS_p.Q61K; A0101
ILDTAGKEEY

SEQ ID NO: 25835 - protein, 10 aa, Homo sapiens
  AACR GENIE Results; NRAS_p.Q61K; C0302
ILDTAGKEEY

SEQ ID NO: 25836 - protein, 10 aa, Homo sapiens
  AACR GENIE Results; NRAS_p.Q61K; B1501
ILDTAGKEEY

SEQ ID NO: 25837 - protein, 11 aa, Homo sapiens
  AACR GENIE Results; NRAS_p.Q61K; A2601
DTAGKEEYSAM

SEQ ID NO: 25838 - protein, 10 aa, Homo sapiens
  AACR GENIE Results; NRAS_p.Q61K; B5801
ILDTAGKEEY

SEQ ID NO: 25839 - protein, 10 aa, Homo sapiens
  AACR GENIE Results; NRAS_p.Q61K; B4601
ILDTAGKEEY

SEQ ID NO: 25840 - protein, 11 aa, Homo sapiens
  AACR GENIE Results; NRAS_p.Q61K; B3501
DILDTAGKEEY

SEQ ID NO: 25841 - protein, 10 aa, Homo sapiens
  AACR GENIE Results; NRAS_p.Q61K; B3901
ILDTAGKEEY

SEQ ID NO: 25842 - protein, 11 aa, Homo sapiens
  AACR GENIE Results; NRAS_p.Q61K; A2601
DILDTAGKEEY

SEQ ID NO: 25843 - protein, 9 aa, Homo sapiens
  AACR GENIE Results; NRAS_p.Q61K; B2702
LDILDTAGK

SEQ ID NO: 25844 - protein, 10 aa, Homo sapiens
  AACR GENIE Results; NRAS_p.Q61K; C0801
ILDTAGKEEY

SEQ ID NO: 25845 - protein, 10 aa, Homo sapiens
  AACR GENIE Results; NRAS_p.Q61K; B3501
ILDTAGKEEY

SEQ ID NO: 25846 - protein, 10 aa, Homo sapiens
  AACR GENIE Results; NRAS_p.Q61K; B3501
TAGKEEYSAM

SEQ ID NO: 25847 - protein, 10 aa, Homo sapiens
  AACR GENIE Results; NRAS_p.Q61K; B2702
LLDILDTAGK

SEQ ID NO: 25848 - protein, 10 aa, Homo sapiens
  AACR GENIE Results; NRAS_p.Q61K; B3503
TAGKEEYSAM

SEQ ID NO: 25849 - protein, 10 aa, Homo sapiens
  AACR GENIE Results; NRAS_p.Q61K; A2902
ILDTAGKEEY

SEQ ID NO: 25850 - protein, 9 aa, Homo sapiens
  AACR GENIE Results; NRAS_p.Q61K; B3501
LDTAGKEEY

SEQ ID NO: 25851 - protein, 11 aa, Homo sapiens
  AACR GENIE Results; NRAS_p.Q61K; B2702
DILDTAGKEEY

SEQ ID NO: 25852 - protein, 10 aa, Homo sapiens
  AACR GENIE Results; NRAS_p.Q61K; B3502
TAGKEEYSAM

SEQ ID NO: 25853 - protein, 9 aa, Homo sapiens
  AACR GENIE Results; NRAS_p.Q61K; B1501
AGKEEYSAM

SEQ ID NO: 25854 - protein, 10 aa, Homo sapiens
  AACR GENIE Results; NRAS_p.Q61K; A3002
ILDTAGKEEY

SEQ ID NO: 25855 - protein, 10 aa, Homo sapiens
  AACR GENIE Results; NRAS_p.Q61K; A2901
ILDTAGKEEY

SEQ ID NO: 25856 - protein, 11 aa, Homo sapiens
  AACR GENIE Results; NRAS_p.Q61K; B1501
DILDTAGKEEY

SEQ ID NO: 25857 - protein, 9 aa, Homo sapiens
  AACR GENIE Results; NRAS_p.Q61K; B3502
TAGKEEYSA

SEQ ID NO: 25858 - protein, 10 aa, Homo sapiens
  AACR GENIE Results; NRAS_p.Q61K; C0802
ILDTAGKEEY

SEQ ID NO: 25859 - protein, 10 aa, Homo sapiens
  AACR GENIE Results; NRAS_p.Q61L; A0101
ILDTAGLEEY

SEQ ID NO: 25860 - protein, 11 aa, Homo sapiens
  AACR GENIE Results; NRAS_p.Q61L; A2601
DTAGLEEYSAM

SEQ ID NO: 25861 - protein, 11 aa, Homo sapiens
  AACR GENIE Results; NRAS_p.Q61L; B3501
DILDTAGLEEY

SEQ ID NO: 25862 - protein, 10 aa, Homo sapiens
  AACR GENIE Results; NRAS_p.Q61L; B1501
ILDTAGLEEY

SEQ ID NO: 25863 - protein, 11 aa, Homo sapiens
  AACR GENIE Results; NRAS_p.Q61L; A2601
DILDTAGLEEY

SEQ ID NO: 25864 - protein, 10 aa, Homo sapiens
  AACR GENIE Results; NRAS_p.Q61L; B3901
ILDTAGLEEY

SEQ ID NO: 25865 - protein, 8 aa, Homo sapiens
  AACR GENIE Results; NRAS_p.Q61L; A2601
DTAGLEEY

SEQ ID NO: 25866 - protein, 9 aa, Homo sapiens
  AACR GENIE Results; NRAS_p.Q61L; B3501
LDTAGLEEY

SEQ ID NO: 25867 - protein, 11 aa, Homo sapiens
  AACR GENIE Results; NRAS_p.Q61L; B2702
DILDTAGLEEY

SEQ ID NO: 25868 - protein, 10 aa, Homo sapiens
  AACR GENIE Results; NRAS_p.Q61L; B3501
ILDTAGLEEY

SEQ ID NO: 25869 - protein, 10 aa, Homo sapiens
  AACR GENIE Results; NRAS_p.Q61L; B3501
TAGLEEYSAM

SEQ ID NO: 25870 - protein, 9 aa, Homo sapiens
  AACR GENIE Results; NRAS_p.Q61L; B1801
LDTAGLEEY

SEQ ID NO: 25871 - protein, 10 aa, Homo sapiens
  AACR GENIE Results; NRAS_p.Q61L; A2902
ILDTAGLEEY

SEQ ID NO: 25872 - protein, 10 aa, Homo sapiens
  AACR GENIE Results; NRAS_p.Q61L; B2702
ILDTAGLEEY

SEQ ID NO: 25873 - protein, 10 aa, Homo sapiens
  AACR GENIE Results; NRAS_p.Q61L; A0201
ILDTAGLEEY

SEQ ID NO: 25874 - protein, 10 aa, Homo sapiens
  AACR GENIE Results; NRAS_p.Q61L; B3503
TAGLEEYSAM

SEQ ID NO: 25875 - protein, 9 aa, Homo sapiens
  AACR GENIE Results; NRAS_p.Q61L; B4002
LDILDTAGL

SEQ ID NO: 25876 - protein, 11 aa, Homo sapiens
  AACR GENIE Results; NRAS_p.Q61L; B1501
DILDTAGLEEY

SEQ ID NO: 25877 - protein, 11 aa, Homo sapiens
  AACR GENIE Results; NRAS_p.Q61L; A6801
DTAGLEEYSAM

SEQ ID NO: 25878 - protein, 10 aa, Homo sapiens
  AACR GENIE Results; NRAS_p.Q61L; A6801
DTAGLEEYSA

SEQ ID NO: 25879 - protein, 11 aa, Homo sapiens
  AACR GENIE Results; NRAS_p.Q61L; A2902
DILDTAGLEEY

SEQ ID NO: 25880 - protein, 10 aa, Homo sapiens
  AACR GENIE Results; NRAS_p.Q61R; A0101
ILDTAGREEY

SEQ ID NO: 25881 - protein, 10 aa, Homo sapiens
  AACR GENIE Results; NRAS_p.Q61R; C0302
ILDTAGREEY

SEQ ID NO: 25882 - protein, 10 aa, Homo sapiens
  AACR GENIE Results; NRAS_p.Q61R; B1501
ILDTAGREEY

SEQ ID NO: 25883 - protein, 10 aa, Homo sapiens
  AACR GENIE Results; NRAS_p.Q61R; B5801
ILDTAGREEY

SEQ ID NO: 25884 - protein, 11 aa, Homo sapiens
  AACR GENIE Results; NRAS_p.Q61R; B3501
DILDTAGREEY

SEQ ID NO: 25885 - protein, 11 aa, Homo sapiens
  AACR GENIE Results; NRAS_p.Q61R; A2601
DILDTAGREEY

SEQ ID NO: 25886 - protein, 10 aa, Homo sapiens
  AACR GENIE Results; NRAS_p.Q61R; B2702
ILDTAGREEY

SEQ ID NO: 25887 - protein, 11 aa, Homo sapiens
  AACR GENIE Results; NRAS_p.Q61R; A2601
DTAGREEYSAM

SEQ ID NO: 25888 - protein, 10 aa, Homo sapiens
  AACR GENIE Results; NRAS_p.Q61R; B3901
ILDTAGREEY

SEQ ID NO: 25889 - protein, 10 aa, Homo sapiens
  AACR GENIE Results; NRAS_p.Q61R; A2902
ILDTAGREEY

SEQ ID NO: 25890 - protein, 9 aa, Homo sapiens
  AACR GENIE Results; NRAS_p.Q61R; B2702
LDILDTAGR

SEQ ID NO: 25891 - protein, 10 aa, Homo sapiens
  AACR GENIE Results; NRAS_p.Q61R; A3002
ILDTAGREEY

SEQ ID NO: 25892 - protein, 11 aa, Homo sapiens
  AACR GENIE Results; NRAS_p.Q61R; B2702
DILDTAGREEY

SEQ ID NO: 25893 - protein, 9 aa, Homo sapiens
  AACR GENIE Results; NRAS_p.Q61R; B2705
GREEYSAMR

SEQ ID NO: 25894 - protein, 10 aa, Homo sapiens
  AACR GENIE Results; NRAS_p.Q61R; B3501
ILDTAGREEY

SEQ ID NO: 25895 - protein, 9 aa, Homo sapiens
  AACR GENIE Results; NRAS_p.Q61R; B3501
LDTAGREEY

SEQ ID NO: 25896 - protein, 10 aa, Homo sapiens
  AACR GENIE Results; NRAS_p.Q61R; B3501
TAGREEYSAM

SEQ ID NO: 25897 - protein, 11 aa, Homo sapiens
  AACR GENIE Results; NRAS_p.Q61R; B1501
DILDTAGREEY

SEQ ID NO: 25898 - protein, 10 aa, Homo sapiens
  AACR GENIE Results; NRAS_p.Q61R; B3502
TAGREEYSAM

SEQ ID NO: 25899 - protein, 10 aa, Homo sapiens
  AACR GENIE Results; NRAS_p.Q61R; B3503
TAGREEYSAM

SEQ ID NO: 25900 - protein, 11 aa, Homo sapiens
  AACR GENIE Results; NRAS_p.Q61R; B1801
DILDTAGREEY

SEQ ID NO: 25901 - protein, 10 aa, Homo sapiens
  AACR GENIE Results; NRAS_p.Q61R; B5701
ILDTAGREEY

SEQ ID NO: 25902 - protein, 10 aa, Homo sapiens
  AACR GENIE Results; NRAS_p.Q61R; C0801
ILDTAGREEY

SEQ ID NO: 25903 - protein, 9 aa, Homo sapiens
  AACR GENIE Results; NRAS_p.Q61R; B0702
AGREEYSAM

SEQ ID NO: 25904 - protein, 11 aa, Homo sapiens
  AACR GENIE Results; NTRK1_p.M539I; A0201
NLLPEQDKILV

SEQ ID NO: 25905 - protein, 11 aa, Homo sapiens
  AACR GENIE Results; NTRK1_p.M539I; A0201
LLPEQDKILVA

SEQ ID NO: 25906 - protein, 9 aa, Homo sapiens
  AACR GENIE Results; NTRK1_p.P335L; C0303
FIFTEFLEL

SEQ ID NO: 25907 - protein, 9 aa, Homo sapiens
  AACR GENIE Results; NTRK1_p.P335L; C1502
FIFTEFLEL

SEQ ID NO: 25908 - protein, 9 aa, Homo sapiens
  AACR GENIE Results; NTRK1_p.P335L; C0304
FIFTEFLEL

SEQ ID NO: 25909 - protein, 9 aa, Homo sapiens
  AACR GENIE Results; NTRK1_p.P335L; A6801
ELAANETVR

SEQ ID NO: 25910 - protein, 9 aa, Homo sapiens
  AACR GENIE Results; NTRK1_p.P335L; C0202
FIFTEFLEL

SEQ ID NO: 25911 - protein, 8 aa, Homo sapiens
  AACR GENIE Results; NTRK1_p.R686C; B5701
CTMLPIRW

SEQ ID NO: 25912 - protein, 9 aa, Homo sapiens
  AACR GENIE Results; NTRK1_p.R744H; A1101
ITQGHELER

SEQ ID NO: 25913 - protein, 9 aa, Homo sapiens
  AACR GENIE Results; NTRK1_p.R748W; B5701
ITQGRELEW

SEQ ID NO: 25914 - protein, 8 aa, Homo sapiens
  AACR GENIE Results; NTRK1_p.W514C; B0801
DIVLKCEL

SEQ ID NO: 25915 - protein, 9 aa, Homo sapiens
  AACR GENIE Results; NTRK3_p.D50N; C0602
RRPDNGNLF

SEQ ID NO: 25916 - protein, 9 aa, Homo sapiens
  AACR GENIE Results; NTRK3_p.G666C; B1501
SQIASCMVY

SEQ ID NO: 25917 - protein, 9 aa, Homo sapiens
  AACR GENIE Results; NTRK3_p.G699V; A0301
KIGDFVMSR

SEQ ID NO: 25918 - protein, 9 aa, Homo sapiens
  AACR GENIE Results; NTRK3_p.P304T; A2402
YYTPRVVSL

SEQ ID NO: 25919 - protein, 9 aa, Homo sapiens
  AACR GENIE Results; NTRK3_p.P304T; A0301
TVYYTPRVV

SEQ ID NO: 25920 - protein, 9 aa, Homo sapiens
  AACR GENIE Results; NTRK3_p.P304T; B5101
TVYYTPRVV

SEQ ID NO: 25921 - protein, 9 aa, Homo sapiens
  AACR GENIE Results; NTRK3_p.Q159H; B4403
RELQLEHNF

SEQ ID NO: 25922 - protein, 9 aa, Homo sapiens
  AACR GENIE Results; NTRK3_p.Q159H; B4402
RELQLEHNF

SEQ ID NO: 25923 - protein, 9 aa, Homo sapiens
  AACR GENIE Results; NTRK3_p.Q159H; A2301
RELQLEHNF

SEQ ID NO: 25924 - protein, 10 aa, Homo sapiens
  AACR GENIE Results; NTRK3_p.Q159H; A2301
RELQLEHNFF

SEQ ID NO: 25925 - protein, 10 aa, Homo sapiens
  AACR GENIE Results; NTRK3_p.Q159H; B4403
RELQLEHNFF

SEQ ID NO: 25926 - protein, 9 aa, Homo sapiens
  AACR GENIE Results; NTRK3_p.R306H; A2402
YYPPHVVSL

SEQ ID NO: 25927 - protein, 9 aa, Homo sapiens
  AACR GENIE Results; NTRK3_p.R306H; C0702
YYPPHVVSL

SEQ ID NO: 25928 - protein, 8 aa, Homo sapiens
  AACR GENIE Results; NTRK3_p.R306H; B5101
YPPHVVSL

SEQ ID NO: 25929 - protein, 10 aa, Homo sapiens
  AACR GENIE Results; NTRK3_p.R306H; A2402
VYYPPHVVSL

SEQ ID NO: 25930 - protein, 9 aa, Homo sapiens
  AACR GENIE Results; NTRK3_p.R306H; C1203
TVYYPPHVV

SEQ ID NO: 25931 - protein, 9 aa, Homo sapiens
  AACR GENIE Results; NTRK3_p.R306H; C0401
YYPPHVVSL

SEQ ID NO: 25932 - protein, 9 aa, Homo sapiens
  AACR GENIE Results; NTRK3_p.R306H; B5101
TVYYPPHVV

SEQ ID NO: 25933 - protein, 9 aa, Homo sapiens
  AACR GENIE Results; NTRK3_p.R306H; C0602
YYPPHVVSL

SEQ ID NO: 25934 - protein, 9 aa, Homo sapiens
  AACR GENIE Results; NTRK3_p.R306H; C0102
YYPPHVVSL

SEQ ID NO: 25935 - protein, 10 aa, Homo sapiens
  AACR GENIE Results; PBRM1_p.I279Yfs*4; B5101
DANSIKKYFI

SEQ ID NO: 25936 - protein, 9 aa, Homo sapiens
  AACR GENIE Results; PBRM1_p.I279Yfs*4; B4403
KDANSIKKY

SEQ ID NO: 25937 - protein, 8 aa, Homo sapiens
  AACR GENIE Results; PBRM1_p.I279Yfs*4; B3501
DANSIKKY

SEQ ID NO: 25938 - protein, 8 aa, Homo sapiens
  AACR GENIE Results; PBRM1_p.I279Yfs*4; B5101
DANSIKKY

SEQ ID NO: 25939 - protein, 8 aa, Homo sapiens
  AACR GENIE Results; PBRM1_p.I279Yfs*4; B1801
DANSIKKY

SEQ ID NO: 25940 - protein, 8 aa, Homo sapiens
  AACR GENIE Results; PBRM1_p.I279Yfs*4; A2601
DANSIKKY

SEQ ID NO: 25941 - protein, 9 aa, Homo sapiens
  AACR GENIE Results; PBRM1_p.I279Yfs*4; B4402
KDANSIKKY

SEQ ID NO: 25942 - protein, 10 aa, Homo sapiens
  AACR GENIE Results; PBRM1_p.R1088W; B5101
VPWDVPLPVV

SEQ ID NO: 25943 - protein, 9 aa, Homo sapiens
  AACR GENIE Results; PBRM1_p.R1088W; B5101
VPWDVPLPV

SEQ ID NO: 25944 - protein, 9 aa, Homo sapiens
  AACR GENIE Results; PBRM1_p.R1088W; B3501
VPWDVPLPV

SEQ ID NO: 25945 - protein, 9 aa, Homo sapiens
  AACR GENIE Results; PBRM1_p.R1088W; B5701
ISSVRFVPW

SEQ ID NO: 25946 - protein, 9 aa, Homo sapiens
  AACR GENIE Results; PBRM1_p.R1088W; A0201
VPWDVPLPV

SEQ ID NO: 25947 - protein, 9 aa, Homo sapiens
  AACR GENIE Results; PBRM1_p.R876C; C1402
FFIKICDEL

SEQ ID NO: 25948 - protein, 8 aa, Homo sapiens
  AACR GENIE Results; PBRM1_p.R876C; B0801
FIKICDEL

SEQ ID NO: 25949 - protein, 8 aa, Homo sapiens
  AACR GENIE Results; PDGFRA_p.E262Q; B4901
QEIKVPSI

SEQ ID NO: 25950 - protein, 10 aa, Homo sapiens
  AACR GENIE Results; PDGFRA_p.E262Q; B4001
QEIKVPSIKL

SEQ ID NO: 25951 - protein, 8 aa, Homo sapiens
  AACR GENIE Results; PDGFRA_p.E262Q; B1801
QEIKVPSI

SEQ ID NO: 25952 - protein, 9 aa, Homo sapiens
  AACR GENIE Results; PDGFRA_p.E262Q; B1302
LQEIKVPSI

SEQ ID NO: 25953 - protein, 10 aa, Homo sapiens
  AACR GENIE Results; PDGFRA_p.E262Q; B4403
QEIKVPSIKL

SEQ ID NO: 25954 - protein, 10 aa, Homo sapiens
  AACR GENIE Results; PDGFRA_p.E262Q; A3001
QEIKVPSIKL

SEQ ID NO: 25955 - protein, 8 aa, Homo sapiens
  AACR GENIE Results; PDGFRA_p.E262Q; B1302
QEIKVPSI

SEQ ID NO: 25956 - protein, 8 aa, Homo sapiens
  AACR GENIE Results; PDGFRA_p.E262Q; A3001
QEIKVPSI

SEQ ID NO: 25957 - protein, 10 aa, Homo sapiens
  AACR GENIE Results; PDGFRA_p.E262Q; A0201
MLQEIKVPSI

SEQ ID NO: 25958 - protein, 9 aa, Homo sapiens
  AACR GENIE Results; PDGFRA_p.E262Q; B1302
KGITMLQEI

SEQ ID NO: 25959 - protein, 8 aa, Homo sapiens
  AACR GENIE Results; PDGFRA_p.E262Q; A2301
QEIKVPSI

SEQ ID NO: 25960 - protein, 8 aa, Homo sapiens
  AACR GENIE Results; PDGFRA_p.E262Q; B5101
QEIKVPSI

SEQ ID NO: 25961 - protein, 8 aa, Homo sapiens
  AACR GENIE Results; PDGFRA_p.E262Q; B1302
GITMLQEI

SEQ ID NO: 25962 - protein, 11 aa, Homo sapiens
  AACR GENIE Results; PDGFRA_p.E262Q; A0201
TMLQEIKVPSI

SEQ ID NO: 25963 - protein, 9 aa, Homo sapiens
  AACR GENIE Results; PDGFRA_p.F182L; B5101
QGFNGTLTV

SEQ ID NO: 25964 - protein, 9 aa, Homo sapiens
  AACR GENIE Results; PDGFRA_p.F182L; B3501
NGTLTVGPY

SEQ ID NO: 25965 - protein, 9 aa, Homo sapiens
  AACR GENIE Results; PDGFRA_p.F182L; C1203
QGFNGTLTV

SEQ ID NO: 25966 - protein, 9 aa, Homo sapiens
  AACR GENIE Results; PDGFRA_p.P6L; A6802
GTSHLAFLV

SEQ ID NO: 25967 - protein, 9 aa, Homo sapiens
  AACR GENIE Results; PDGFRA_p.P6L; C1502
TSHLAFLVL

SEQ ID NO: 25968 - protein, 8 aa, Homo sapiens
  AACR GENIE Results; PDGFRA_p.P6L; A6802
TSHLAFLV

SEQ ID NO: 25969 - protein, 9 aa, Homo sapiens
  AACR GENIE Results; PDGFRA_p.P6L; C1601
TSHLAFLVL

SEQ ID NO: 25970 - protein, 8 aa, Homo sapiens
  AACR GENIE Results; PDGFRA_p.P6L; B5101
TSHLAFLV

SEQ ID NO: 25971 - protein, 9 aa, Homo sapiens
  AACR GENIE Results; PDGFRA_p.P6L; B5701
GTSHLAFLV

SEQ ID NO: 25972 - protein, 9 aa, Homo sapiens
  AACR GENIE Results; PDGFRA_p.P6L; C0303
TSHLAFLVL

SEQ ID NO: 25973 - protein, 8 aa, Homo sapiens
  AACR GENIE Results; PDGFRA_p.P6L; B1302
TSHLAFLV

SEQ ID NO: 25974 - protein, 9 aa, Homo sapiens
  AACR GENIE Results; PDGFRA_p.P6L; B5801
GTSHLAFLV

SEQ ID NO: 25975 - protein, 9 aa, Homo sapiens
  AACR GENIE Results; PDGFRA_p.P6L; C0304
TSHLAFLVL

SEQ ID NO: 25976 - protein, 10 aa, Homo sapiens
  AACR GENIE Results; PDGFRA_p.P6L; A6802
GTSHLAFLVL

SEQ ID NO: 25977 - protein, 8 aa, Homo sapiens
  AACR GENIE Results; PDGFRA_p.R340W; B5101
WAYPPPRI

SEQ ID NO: 25978 - protein, 10 aa, Homo sapiens
  AACR GENIE Results; PDGFRA_p.R340W; B5701
WAYPPPRISW

SEQ ID NO: 25979 - protein, 9 aa, Homo sapiens
  AACR GENIE Results; PDGFRA_p.R340W; A2902
HFVVEVWAY

SEQ ID NO: 25980 - protein, 8 aa, Homo sapiens
  AACR GENIE Results; PDGFRA_p.R340W; B5701
KHFVVEVW

SEQ ID NO: 25981 - protein, 9 aa, Homo sapiens
  AACR GENIE Results; PDGFRB_p.G126D; C0401
VPDPTVDFL

SEQ ID NO: 25982 - protein, 9 aa, Homo sapiens
  AACR GENIE Results; PDGFRB_p.G126D; C0802
VPDPTVDFL

SEQ ID NO: 25983 - protein, 9 aa, Homo sapiens
  AACR GENIE Results; PDGFRB_p.G126D; B3501
VPDPTVDFL

SEQ ID NO: 25984 - protein, 9 aa, Homo sapiens
  AACR GENIE Results; PDGFRB_p.G126D; C0501
VPDPTVDFL

SEQ ID NO: 25985 - protein, 10 aa, Homo sapiens
  AACR GENIE Results; PDGFRB_p.G126D; A2402
IFVPDPTVDF

SEQ ID NO: 25986 - protein, 9 aa, Homo sapiens
  AACR GENIE Results; PDGFRB_p.G126D; B3501
FVPDPTVDF

SEQ ID NO: 25987 - protein, 10 aa, Homo sapiens
  AACR GENIE Results; PDGFRB_p.G126D; C0102
FVPDPTVDFL

SEQ ID NO: 25988 - protein, 8 aa, Homo sapiens
  AACR GENIE Results; PDGFRB_p.G126D; B3501
VPDPTVDF

SEQ ID NO: 25989 - protein, 9 aa, Homo sapiens
  AACR GENIE Results; PDGFRB_p.G126D; C0102
FVPDPTVDF

SEQ ID NO: 25990 - protein, 9 aa, Homo sapiens
  AACR GENIE Results; PDGFRB_p.R113Q; B4403
LETDEQKRL

SEQ ID NO: 25991 - protein, 9 aa, Homo sapiens
  AACR GENIE Results; PDGFRB_p.R113Q; A2601
ETDEQKRLY

SEQ ID NO: 25992 - protein, 9 aa, Homo sapiens
  AACR GENIE Results; PDGFRB_p.R113Q; A0101
ETDEQKRLY

SEQ ID NO: 25993 - protein, 10 aa, Homo sapiens
  AACR GENIE Results; PDGFRB_p.R113Q; B4403
LETDEQKRLY

SEQ ID NO: 25994 - protein, 9 aa, Homo sapiens
  AACR GENIE Results; PDGFRB_p.R113Q; B4001
LETDEQKRL

SEQ ID NO: 25995 - protein, 10 aa, Homo sapiens
  AACR GENIE Results; PDGFRB_p.R113Q; B4402
LETDEQKRLY

SEQ ID NO: 25996 - protein, 9 aa, Homo sapiens
  AACR GENIE Results; PDGFRB_p.R113Q; A2301
DEQKRLYIF

SEQ ID NO: 25997 - protein, 9 aa, Homo sapiens
  AACR GENIE Results; PDGFRB_p.R113Q; B4402
LETDEQKRL

SEQ ID NO: 25998 - protein, 9 aa, Homo sapiens
  AACR GENIE Results; PDGFRB_p.R376W; B4001
SETWYVSEL

SEQ ID NO: 25999 - protein, 9 aa, Homo sapiens
  AACR GENIE Results; PDGFRB_p.R376W; B4403
SETWYVSEL

SEQ ID NO: 26000 - protein, 10 aa, Homo sapiens
  AACR GENIE Results; PHOX2B_p.R102C; A1101
CTTFTSAQLK

SEQ ID NO: 26001 - protein, 11 aa, Homo sapiens
  AACR GENIE Results; PIK3C2B_p.R21H; A0301
KSLESVGISHK

SEQ ID NO: 26002 - protein, 11 aa, Homo sapiens
  AACR GENIE Results; PIK3C2B_p.R21H; A1101
KSLESVGISHK

SEQ ID NO: 26003 - protein, 8 aa, Homo sapiens
  AACR GENIE Results; PIK3C2B_p.R21H; B1801
LESVGISH

SEQ ID NO: 26004 - protein, 10 aa, Homo sapiens
  AACR GENIE Results; PIK3C2B_p.R21H; A0301
KSLESVGISH

SEQ ID NO: 26005 - protein, 9 aa, Homo sapiens
  AACR GENIE Results; PIK3C2B_p.R938C; C0501
YLDSPLVCF

SEQ ID NO: 26006 - protein, 9 aa, Homo sapiens
  AACR GENIE Results; PIK3C2B_p.R938C; C0802
YLDSPLVCF

SEQ ID NO: 26007 - protein, 9 aa, Homo sapiens
  AACR GENIE Results; PIK3C2B_p.S796R; C0202
FTRPPGDKF

SEQ ID NO: 26008 - protein, 10 aa, Homo sapiens
  AACR GENIE Results; PIK3C2G_p.R738C; A1101
SSFPDQEICK

SEQ ID NO: 26009 - protein, 9 aa, Homo sapiens
  AACR GENIE Results; PIK3C2G_p.R738C; B5101
FPDQEICKV

SEQ ID NO: 26010 - protein, 9 aa, Homo sapiens
  AACR GENIE Results; PIK3C2G_p.R738C; C0501
FPDQEICKV

SEQ ID NO: 26011 - protein, 9 aa, Homo sapiens
  AACR GENIE Results; PIK3CA_p.C420R; B4403
KEEHRPLAW

SEQ ID NO: 26012 - protein, 8 aa, Homo sapiens
  AACR GENIE Results; PIK3CA_p.C420R; B4403
EEHRPLAW

SEQ ID NO: 26013 - protein, 9 aa, Homo sapiens
  AACR GENIE Results; PIK3CA_p.C901F; C0802
AIDLFTRSF

SEQ ID NO: 26014 - protein, 10 aa, Homo sapiens
  AACR GENIE Results; PIK3CA_p.C901F; B5701
AAIDLFTRSF

SEQ ID NO: 26015 - protein, 10 aa, Homo sapiens
  AACR GENIE Results; PIK3CA_p.C901F; C1601
AAIDLFTRSF

SEQ ID NO: 26016 - protein, 10 aa, Homo sapiens
  AACR GENIE Results; PIK3CA_p.C901F; A2301
SFAGYCVATF

SEQ ID NO: 26017 - protein, 9 aa, Homo sapiens
  AACR GENIE Results; PIK3CA_p.C901F; C0401
AIDLFTRSF

SEQ ID NO: 26018 - protein, 9 aa, Homo sapiens
  AACR GENIE Results; PIK3CA_p.C901F; C0501
AIDLFTRSF

SEQ ID NO: 26019 - protein, 11 aa, Homo sapiens
  AACR GENIE Results; PIK3CA_p.E110del; A1101
KVIEPVGNREK

SEQ ID NO: 26020 - protein, 11 aa, Homo sapiens
  AACR GENIE Results; PIK3CA_p.E110del; A0301
KVIEPVGNREK

SEQ ID NO: 26021 - protein, 10 aa, Homo sapiens
  AACR GENIE Results; PIK3CA_p.E110del; A0301
VIEPVGNREK

SEQ ID NO: 26022 - protein, 10 aa, Homo sapiens
  AACR GENIE Results; PIK3CA_p.E110del; A1101
VIEPVGNREK

SEQ ID NO: 26023 - protein, 9 aa, Homo sapiens
  AACR GENIE Results; PIK3CA_p.E453K; A3001
KDLLNPIGV

SEQ ID NO: 26024 - protein, 9 aa, Homo sapiens
  AACR GENIE Results; PIK3CA_p.E453K; A0201
KDLLNPIGV

SEQ ID NO: 26025 - protein, 11 aa, Homo sapiens
  AACR GENIE Results; PIK3CA_p.E453Q; A0201
GLQDLLNPIGV

SEQ ID NO: 26026 - protein, 11 aa, Homo sapiens
  AACR GENIE Results; PIK3CA_p.E542K; B5701
KITEQEKDFLW

SEQ ID NO: 26027 - protein, 11 aa, Homo sapiens
  AACR GENIE Results; PIK3CA_p.E542K; A3101
STRDPLSKITE

SEQ ID NO: 26028 - protein, 9 aa, Homo sapiens
  AACR GENIE Results; PIK3CA_p.E542K; B5701
STRDPLSKI

SEQ ID NO: 26029 - protein, 9 aa, Homo sapiens
  AACR GENIE Results; PIK3CA_p.E542K; A0203
STRDPLSKI

SEQ ID NO: 26030 - protein, 9 aa, Homo sapiens
  AACR GENIE Results; PIK3CA_p.E542K; A3001
STRDPLSKI

SEQ ID NO: 26031 - protein, 9 aa, Homo sapiens
  AACR GENIE Results; PIK3CA_p.E542V; C1502
ISTRDPLSV

SEQ ID NO: 26032 - protein, 9 aa, Homo sapiens
  AACR GENIE Results; PIK3CA_p.E542V; B5701
STRDPLSVI

SEQ ID NO: 26033 - protein, 9 aa, Homo sapiens
  AACR GENIE Results; PIK3CA_p.E542V; B0702
STRDPLSVI

SEQ ID NO: 26034 - protein, 11 aa, Homo sapiens
  AACR GENIE Results; PIK3CA_p.E542V; B5701
VITEQEKDFLW

SEQ ID NO: 26035 - protein, 9 aa, Homo sapiens
  AACR GENIE Results; PIK3CA_p.E542V; B1302
ISTRDPLSV

SEQ ID NO: 26036 - protein, 8 aa, Homo sapiens
  AACR GENIE Results; PIK3CA_p.E542V; C1502
STRDPLSV

SEQ ID NO: 26037 - protein, 10 aa, Homo sapiens
  AACR GENIE Results; PIK3CA_p.E545A; B4403
SEITAQEKDF

SEQ ID NO: 26038 - protein, 10 aa, Homo sapiens
  AACR GENIE Results; PIK3CA_p.E545A; B5701
ITAQEKDFLW

SEQ ID NO: 26039 - protein, 11 aa, Homo sapiens
  AACR GENIE Results; PIK3CA_p.E545A; B4001
SEITAQEKDFL

SEQ ID NO: 26040 - protein, 10 aa, Homo sapiens
  AACR GENIE Results; PIK3CA_p.E545A; B4402
SEITAQEKDF

SEQ ID NO: 26041 - protein, 9 aa, Homo sapiens
  AACR GENIE Results; PIK3CA_p.E545A; B5701
TAQEKDFLW

SEQ ID NO: 26042 - protein, 11 aa, Homo sapiens
  AACR GENIE Results; PIK3CA_p.E545A; B4002
SEITAQEKDFL

SEQ ID NO: 26043 - protein, 8 aa, Homo sapiens
  AACR GENIE Results; PIK3CA_p.E545A; B3502
DPLSEITA

SEQ ID NO: 26044 - protein, 9 aa, Homo sapiens
  AACR GENIE Results; PIK3CA_p.E545A; A0205
ITAQEKDFL

SEQ ID NO: 26045 - protein, 9 aa, Homo sapiens
  AACR GENIE Results; PIK3CA_p.E545A; B3906
RDPLSEITA

SEQ ID NO: 26046 - protein, 10 aa, Homo sapiens
  AACR GENIE Results; PIK3CA_p.E545D; B4403
SEITDQEKDF

SEQ ID NO: 26047 - protein, 10 aa, Homo sapiens
  AACR GENIE Results; PIK3CA_p.E545D; B4402
SEITDQEKDF

SEQ ID NO: 26048 - protein, 11 aa, Homo sapiens
  AACR GENIE Results; PIK3CA_p.E545D; B4001
SEITDQEKDFL

SEQ ID NO: 26049 - protein, 10 aa, Homo sapiens
  AACR GENIE Results; PIK3CA_p.E545D; B5701
ITDQEKDFLW

SEQ ID NO: 26050 - protein, 9 aa, Homo sapiens
  AACR GENIE Results; PIK3CA_p.E545D; C0802
ITDQEKDFL

SEQ ID NO: 26051 - protein, 9 aa, Homo sapiens
  AACR GENIE Results; PIK3CA_p.E545D; C0501
ITDQEKDFL

SEQ ID NO: 26052 - protein, 10 aa, Homo sapiens
  AACR GENIE Results; PIK3CA_p.E545G; B4403
SEITGQEKDF

SEQ ID NO: 26053 - protein, 10 aa, Homo sapiens
  AACR GENIE Results; PIK3CA_p.E545G; B4402
SEITGQEKDF

SEQ ID NO: 26054 - protein, 10 aa, Homo sapiens
  AACR GENIE Results; PIK3CA_p.E545G; B5701
ITGQEKDFLW

SEQ ID NO: 26055 - protein, 11 aa, Homo sapiens
  AACR GENIE Results; PIK3CA_p.E545G; B4001
SEITGQEKDFL

SEQ ID NO: 26056 - protein, 11 aa, Homo sapiens
  AACR GENIE Results; PIK3CA_p.E545G; B4002
SEITGQEKDFL

SEQ ID NO: 26057 - protein, 10 aa, Homo sapiens
  AACR GENIE Results; PIK3CA_p.E545K; B5701
ITKQEKDFLW

SEQ ID NO: 26058 - protein, 11 aa, Homo sapiens
  AACR GENIE Results; PIK3CA_p.E545K; A1101
STRDPLSEITK

SEQ ID NO: 26059 - protein, 11 aa, Homo sapiens
  AACR GENIE Results; PIK3CA_p.E545K; A0302
STRDPLSEITK

SEQ ID NO: 26060 - protein, 10 aa, Homo sapiens
  AACR GENIE Results; PIK3CA_p.E545K; B4403
SEITKQEKDF

SEQ ID NO: 26061 - protein, 10 aa, Homo sapiens
  AACR GENIE Results; PIK3CA_p.E545K; B2705
TRDPLSEITK

SEQ ID NO: 26062 - protein, 10 aa, Homo sapiens
  AACR GENIE Results; PIK3CA_p.E545K; B4405
SEITKQEKDF

SEQ ID NO: 26063 - protein, 10 aa, Homo sapiens
  AACR GENIE Results; PIK3CA_p.E545K; B2702
TRDPLSEITK

SEQ ID NO: 26064 - protein, 11 aa, Homo sapiens
  AACR GENIE Results; PIK3CA_p.E545K; A6801
STRDPLSEITK

SEQ ID NO: 26065 - protein, 11 aa, Homo sapiens
  AACR GENIE Results; PIK3CA_p.E545K; A3303
STRDPLSEITK

SEQ ID NO: 26066 - protein, 11 aa, Homo sapiens
  AACR GENIE Results; PIK3CA_p.E545K; A0301
STRDPLSEITK

SEQ ID NO: 26067 - protein, 11 aa, Homo sapiens
  AACR GENIE Results; PIK3CA_p.E545K; A3001
STRDPLSEITK

SEQ ID NO: 26068 - protein, 11 aa, Homo sapiens
  AACR GENIE Results; PIK3CA_p.E545K; A3101
STRDPLSEITK

SEQ ID NO: 26069 - protein, 10 aa, Homo sapiens
  AACR GENIE Results; PIK3CA_p.E545K; B4402
SEITKQEKDF

SEQ ID NO: 26070 - protein, 10 aa, Homo sapiens
  AACR GENIE Results; PIK3CA_p.E545Q; B4403
SEITQQEKDF

SEQ ID NO: 26071 - protein, 10 aa, Homo sapiens
  AACR GENIE Results; PIK3CA_p.E545Q; B5701
ITQQEKDFLW

SEQ ID NO: 26072 - protein, 10 aa, Homo sapiens
  AACR GENIE Results; PIK3CA_p.E545Q; B4402
SEITQQEKDF

SEQ ID NO: 26073 - protein, 11 aa, Homo sapiens
  AACR GENIE Results; PIK3CA_p.E545Q; B4001
SEITQQEKDFL

SEQ ID NO: 26074 - protein, 9 aa, Homo sapiens
  AACR GENIE Results; PIK3CA_p.E726K; B5701
KTQKVQMKF

SEQ ID NO: 26075 - protein, 9 aa, Homo sapiens
  AACR GENIE Results; PIK3CA_p.E726K; B5801
KTQKVQMKF

SEQ ID NO: 26076 - protein, 8 aa, Homo sapiens
  AACR GENIE Results; PIK3CA_p.E726K; B0801
DKTQKVQM

SEQ ID NO: 26077 - protein, 9 aa, Homo sapiens
  AACR GENIE Results; PIK3CA_p.E726K; A3201
KTQKVQMKF

SEQ ID NO: 26078 - protein, 10 aa, Homo sapiens
  AACR GENIE Results; PIK3CA_p.E81K; B5701
VTQEAEREKF

SEQ ID NO: 26079 - protein, 9 aa, Homo sapiens
  AACR GENIE Results; PIK3CA_p.E81K; B4403
QEAEREKFF

SEQ ID NO: 26080 - protein, 9 aa, Homo sapiens
  AACR GENIE Results; PIK3CA_p.E81K; B4402
QEAEREKFF

SEQ ID NO: 26081 - protein, 9 aa, Homo sapiens
  AACR GENIE Results; PIK3CA_p.E81K; C1402
KFFDETRRL

SEQ ID NO: 26082 - protein, 10 aa, Homo sapiens
  AACR GENIE Results; PIK3CA_p.E81K; B5801
VTQEAEREKF

SEQ ID NO: 26083 - protein, 9 aa, Homo sapiens
  AACR GENIE Results; PIK3CA_p.E81K; B3801
TQEAEREKF

SEQ ID NO: 26084 - protein, 9 aa, Homo sapiens
  AACR GENIE Results; PIK3CA_p.E970K; A0301
IVISKGAQK

SEQ ID NO: 26085 - protein, 9 aa, Homo sapiens
  AACR GENIE Results; PIK3CA_p.E970K; A1101
IVISKGAQK

SEQ ID NO: 26086 - protein, 9 aa, Homo sapiens
  AACR GENIE Results; PIK3CA_p.E970K; A6801
IVISKGAQK

SEQ ID NO: 26087 - protein, 9 aa, Homo sapiens
  AACR GENIE Results; PIK3CA_p.E970K; A3001
IVISKGAQK

SEQ ID NO: 26088 - protein, 8 aa, Homo sapiens
  AACR GENIE Results; PIK3CA_p.G1049R; A3303
QMNDAHHR

SEQ ID NO: 26089 - protein, 9 aa, Homo sapiens
  AACR GENIE Results; PIK3CA_p.G1049R; A3101
KQMNDAHHR

SEQ ID NO: 26090 - protein, 9 aa, Homo sapiens
  AACR GENIE Results; PIK3CA_p.G118D; B4901
REIDFAIGM

SEQ ID NO: 26091 - protein, 9 aa, Homo sapiens
  AACR GENIE Results; PIK3CA_p.G118D; B4001
REIDFAIGM

SEQ ID NO: 26092 - protein, 9 aa, Homo sapiens
  AACR GENIE Results; PIK3CA_p.G118D; B4403
REIDFAIGM

SEQ ID NO: 26093 - protein, 9 aa, Homo sapiens
  AACR GENIE Results; PIK3CA_p.G118D; B4402
REIDFAIGM

SEQ ID NO: 26094 - protein, 9 aa, Homo sapiens
  AACR GENIE Results; PIK3CA_p.G118D; A3001
REIDFAIGM

SEQ ID NO: 26095 - protein, 9 aa, Homo sapiens
  AACR GENIE Results; PIK3CA_p.H1047L; A0301
ALHGGWTTK

SEQ ID NO: 26096 - protein, 9 aa, Homo sapiens
  AACR GENIE Results; PIK3CA_p.H1047L; B0801
FMKQMNDAL

SEQ ID NO: 26097 - protein, 10 aa, Homo sapiens
  AACR GENIE Results; PIK3CA_p.H1047L; A6801
DALHGGWTTK

SEQ ID NO: 26098 - protein, 11 aa, Homo sapiens
  AACR GENIE Results; PIK3CA_p.H1047L; B5701
KQMNDALHGGW

SEQ ID NO: 26099 - protein, 8 aa, Homo sapiens
  AACR GENIE Results; PIK3CA_p.H1047L; B3901
MKQMNDAL

SEQ ID NO: 26100 - protein, 9 aa, Homo sapiens
  AACR GENIE Results; PIK3CA_p.H1047R; B2705
ARHGGWTTK

SEQ ID NO: 26101 - protein, 9 aa, Homo sapiens
  AACR GENIE Results; PIK3CA_p.H1047R; A3303
FMKQMNDAR

SEQ ID NO: 26102 - protein, 9 aa, Homo sapiens
  AACR GENIE Results; PIK3CA_p.H1047R; A3101
FMKQMNDAR

SEQ ID NO: 26103 - protein, 9 aa, Homo sapiens
  AACR GENIE Results; PIK3CA_p.H1047Y; B1501
FMKQMNDAY

SEQ ID NO: 26104 - protein, 9 aa, Homo sapiens
  AACR GENIE Results; PIK3CA_p.H1047Y; B5101
DAYHGGWTT

SEQ ID NO: 26105 - protein, 11 aa, Homo sapiens
  AACR GENIE Results; PIK3CA_p.K111N; B4402
EENILNREIGF

SEQ ID NO: 26106 - protein, 11 aa, Homo sapiens
  AACR GENIE Results; PIK3CA_p.K111N; B4403
EENILNREIGF

SEQ ID NO: 26107 - protein, 9 aa, Homo sapiens
  AACR GENIE Results; PIK3CA_p.K111N; B4403
EENILNREI

SEQ ID NO: 26108 - protein, 9 aa, Homo sapiens
  AACR GENIE Results; PIK3CA_p.K111N; B4402
EENILNREI

SEQ ID NO: 26109 - protein, 9 aa, Homo sapiens
  AACR GENIE Results; PIK3CA_p.K111N; B4901
EENILNREI

SEQ ID NO: 26110 - protein, 9 aa, Homo sapiens
  AACR GENIE Results; PIK3CA_p.K111N; B2705
NREENILNR

SEQ ID NO: 26111 - protein, 10 aa, Homo sapiens
  AACR GENIE Results; PIK3CA_p.K111N; B4001
REENILNREI

SEQ ID NO: 26112 - protein, 11 aa, Homo sapiens
  AACR GENIE Results; PIK3CA_p.K111N; B0702
EPVGNREENIL

SEQ ID NO: 26113 - protein, 11 aa, Homo sapiens
  AACR GENIE Results; PIK3CA_p.K111N; A3101
VGNREENILNR

SEQ ID NO: 26114 - protein, 8 aa, Homo sapiens
  AACR GENIE Results; PIK3CA_p.M1043I; B4901
LEYFMKQI

SEQ ID NO: 26115 - protein, 8 aa, Homo sapiens
  AACR GENIE Results; PIK3CA_p.M1043V; B4901
LEYFMKQV

SEQ ID NO: 26116 - protein, 10 aa, Homo sapiens
  AACR GENIE Results; PIK3CA_p.M1043V; A3002
QVNDAHHGGW

SEQ ID NO: 26117 - protein, 10 aa, Homo sapiens
  AACR GENIE Results; PIK3CA_p.M1043V; A3201
QVNDAHHGGW

SEQ ID NO: 26118 - protein, 9 aa, Homo sapiens
  AACR GENIE Results; PIK3CA_p.M1043V; B1501
FMKQVNDAH

SEQ ID NO: 26119 - protein, 8 aa, Homo sapiens
  AACR GENIE Results; PIK3CA_p.M1043V; B5001
LEYFMKQV

SEQ ID NO: 26120 - protein, 10 aa, Homo sapiens
  AACR GENIE Results; PIK3CA_p.M1043V; B5701
QVNDAHHGGW

SEQ ID NO: 26121 - protein, 9 aa, Homo sapiens
  AACR GENIE Results; PIK3CA_p.N345K; A3101
ATYVKLNIR

SEQ ID NO: 26122 - protein, 9 aa, Homo sapiens
  AACR GENIE Results; PIK3CA_p.N345K; B1302
CATYVKLNI

SEQ ID NO: 26123 - protein, 9 aa, Homo sapiens
  AACR GENIE Results; PIK3CA_p.N345K; A3303
ATYVKLNIR

SEQ ID NO: 26124 - protein, 8 aa, Homo sapiens
  AACR GENIE Results; PIK3CA_p.N345K; A3303
TYVKLNIR

SEQ ID NO: 26125 - protein, 9 aa, Homo sapiens
  AACR GENIE Results; PIK3CA_p.Q546H; B4402
TEHEKDFLW

SEQ ID NO: 26126 - protein, 10 aa, Homo sapiens
  AACR GENIE Results; PIK3CA_p.Q546H; B4402
SEITEHEKDF

SEQ ID NO: 26127 - protein, 9 aa, Homo sapiens
  AACR GENIE Results; PIK3CA_p.Q546H; B3501
DPLSEITEH

SEQ ID NO: 26128 - protein, 10 aa, Homo sapiens
  AACR GENIE Results; PIK3CA_p.Q546K; B5701
ITEKEKDFLW

SEQ ID NO: 26129 - protein, 10 aa, Homo sapiens
  AACR GENIE Results; PIK3CA_p.Q546K; B4403
SEITEKEKDF

SEQ ID NO: 26130 - protein, 11 aa, Homo sapiens
  AACR GENIE Results; PIK3CA_p.Q546K; B4001
SEITEKEKDFL

SEQ ID NO: 26131 - protein, 9 aa, Homo sapiens
  AACR GENIE Results; PIK3CA_p.Q546K; B4403
TEKEKDFLW

SEQ ID NO: 26132 - protein, 9 aa, Homo sapiens
  AACR GENIE Results; PIK3CA_p.Q546K; A2301
TEKEKDFLW

SEQ ID NO: 26133 - protein, 8 aa, Homo sapiens
  AACR GENIE Results; PIK3CA_p.Q546K; A1101
PLSEITEK

SEQ ID NO: 26134 - protein, 9 aa, Homo sapiens
  AACR GENIE Results; PIK3CA_p.Q546K; B4402
TEKEKDFLW

SEQ ID NO: 26135 - protein, 10 aa, Homo sapiens
  AACR GENIE Results; PIK3CA_p.Q546K; B4402
SEITEKEKDF

SEQ ID NO: 26136 - protein, 11 aa, Homo sapiens
  AACR GENIE Results; PIK3CA_p.Q546K; B2702
TRDPLSEITEK

SEQ ID NO: 26137 - protein, 9 aa, Homo sapiens
  AACR GENIE Results; PIK3CA_p.Q546K; B5701
TEKEKDFLW

SEQ ID NO: 26138 - protein, 9 aa, Homo sapiens
  AACR GENIE Results; PIK3CA_p.Q546P; B4402
TEPEKDFLW

SEQ ID NO: 26139 - protein, 10 aa, Homo sapiens
  AACR GENIE Results; PIK3CA_p.Q546P; B4402
SEITEPEKDF

SEQ ID NO: 26140 - protein, 10 aa, Homo sapiens
  AACR GENIE Results; PIK3CA_p.Q546R; B4403
SEITEREKDF

SEQ ID NO: 26141 - protein, 9 aa, Homo sapiens
  AACR GENIE Results; PIK3CA_p.Q546R; A3301
DPLSEITER

SEQ ID NO: 26142 - protein, 10 aa, Homo sapiens
  AACR GENIE Results; PIK3CA_p.Q546R; B5701
ITEREKDFLW

SEQ ID NO: 26143 - protein, 9 aa, Homo sapiens
  AACR GENIE Results; PIK3CA_p.Q546R; A3303
DPLSEITER

SEQ ID NO: 26144 - protein, 10 aa, Homo sapiens
  AACR GENIE Results; PIK3CA_p.Q546R; B4402
SEITEREKDF

SEQ ID NO: 26145 - protein, 9 aa, Homo sapiens
  AACR GENIE Results; PIK3CA_p.Q546R; A6801
DPLSEITER

SEQ ID NO: 26146 - protein, 9 aa, Homo sapiens
  AACR GENIE Results; PIK3CA_p.Q546R; B4403
TEREKDFLW

SEQ ID NO: 26147 - protein, 9 aa, Homo sapiens
  AACR GENIE Results; PIK3CA_p.Q546R; B5701
TEREKDFLW

SEQ ID NO: 26148 - protein, 9 aa, Homo sapiens
  AACR GENIE Results; PIK3CA_p.Q546R; A2301
TEREKDFLW

SEQ ID NO: 26149 - protein, 9 aa, Homo sapiens
  AACR GENIE Results; PIK3CA_p.Q546R; B4402
TEREKDFLW

SEQ ID NO: 26150 - protein, 9 aa, Homo sapiens
  AACR GENIE Results; PIK3CA_p.Q546R; B3501
DPLSEITER

SEQ ID NO: 26151 - protein, 9 aa, Homo sapiens
  AACR GENIE Results; PIK3CA_p.Q682H; B0801
EMHNKTVSH

SEQ ID NO: 26152 - protein, 9 aa, Homo sapiens
  AACR GENIE Results; PIK3CA_p.Q75E; B4403
EEAEREEFF

SEQ ID NO: 26153 - protein, 9 aa, Homo sapiens
  AACR GENIE Results; PIK3CA_p.Q75E; B4402
EEAEREEFF

SEQ ID NO: 26154 - protein, 9 aa, Homo sapiens
  AACR GENIE Results; PIK3CA_p.Q75E; B4403
TEEAEREEF

SEQ ID NO: 26155 - protein, 9 aa, Homo sapiens
  AACR GENIE Results; PIK3CA_p.R108H; A1101
KVIEPVGNH

SEQ ID NO: 26156 - protein, 9 aa, Homo sapiens
  AACR GENIE Results; PIK3CA_p.R108H; A0301
KVIEPVGNH

SEQ ID NO: 26157 - protein, 9 aa, Homo sapiens
  AACR GENIE Results; PIK3CA_p.R108H; B1501
KVIEPVGNH

SEQ ID NO: 26158 - protein, 9 aa, Homo sapiens
  AACR GENIE Results; PIK3CA_p.R108H; A3303
NHEEKILNR

SEQ ID NO: 26159 - protein, 11 aa, Homo sapiens
  AACR GENIE Results; PIK3CA_p.R108H; A3101
VGNHEEKILNR

SEQ ID NO: 26160 - protein, 9 aa, Homo sapiens
  AACR GENIE Results; PIK3CA_p.R108H; A2601
KVIEPVGNH

SEQ ID NO: 26161 - protein, 9 aa, Homo sapiens
  AACR GENIE Results; PIK3CA_p.R108H; A6801
NHEEKILNR

SEQ ID NO: 26162 - protein, 9 aa, Homo sapiens
  AACR GENIE Results; PIK3CA_p.R108H; A3101
KVIEPVGNH

SEQ ID NO: 26163 - protein, 9 aa, Homo sapiens
  AACR GENIE Results; PIK3CA_p.R38H; B3801
LHEATLVTI

SEQ ID NO: 26164 - protein, 8 aa, Homo sapiens
  AACR GENIE Results; PIK3CA_p.R38H; B1801
HEATLVTI

SEQ ID NO: 26165 - protein, 8 aa, Homo sapiens
  AACR GENIE Results; PIK3CA_p.R38H; B4001
HEATLVTI

SEQ ID NO: 26166 - protein, 9 aa, Homo sapiens
  AACR GENIE Results; PIK3CA_p.R38H; A0201
VTLECLHEA

SEQ ID NO: 26167 - protein, 8 aa, Homo sapiens
  AACR GENIE Results; PIK3CA_p.R38H; B5101
HEATLVTI

SEQ ID NO: 26168 - protein, 9 aa, Homo sapiens
  AACR GENIE Results; PIK3CA_p.R38H; B4001
LECLHEATL

SEQ ID NO: 26169 - protein, 8 aa, Homo sapiens
  AACR GENIE Results; PIK3CA_p.R88Q; C0401
FFDETRQL

SEQ ID NO: 26170 - protein, 10 aa, Homo sapiens
  AACR GENIE Results; PIK3CA_p.R88Q; B4403
EEFFDETRQL

SEQ ID NO: 26171 - protein, 8 aa, Homo sapiens
  AACR GENIE Results; PIK3CA_p.R88Q; C0802
FFDETRQL

SEQ ID NO: 26172 - protein, 9 aa, Homo sapiens
  AACR GENIE Results; PIK3CA_p.R88Q; C1402
EFFDETRQL

SEQ ID NO: 26173 - protein, 10 aa, Homo sapiens
  AACR GENIE Results; PIK3CA_p.R88Q; B4002
EEFFDETRQL

SEQ ID NO: 26174 - protein, 10 aa, Homo sapiens
  AACR GENIE Results; PIK3CA_p.R88Q; B4402
EEFFDETRQL

SEQ ID NO: 26175 - protein, 8 aa, Homo sapiens
  AACR GENIE Results; PIK3CA_p.R88Q; C1402
FFDETRQL

SEQ ID NO: 26176 - protein, 10 aa, Homo sapiens
  AACR GENIE Results; PIK3CA_p.R88Q; B4001
EEFFDETRQL

SEQ ID NO: 26177 - protein, 9 aa, Homo sapiens
  AACR GENIE Results; PIK3CA_p.R88Q; C0401
FFDETRQLC

SEQ ID NO: 26178 - protein, 8 aa, Homo sapiens
  AACR GENIE Results; PIK3CA_p.R88Q; C0501
FFDETRQL

SEQ ID NO: 26179 - protein, 9 aa, Homo sapiens
  AACR GENIE Results; PIK3CA_p.R88Q; A3303
EFFDETRQL

SEQ ID NO: 26180 - protein, 9 aa, Homo sapiens
  AACR GENIE Results; PIK3CA_p.R88Q; A3303
ETRQLCDLR

SEQ ID NO: 26181 - protein, 9 aa, Homo sapiens
  AACR GENIE Results; PIK3CA_p.T1025A; C1402
AYIRKALAL

SEQ ID NO: 26182 - protein, 8 aa, Homo sapiens
  AACR GENIE Results; PIK3CA_p.T1025A; B0801
IAYIRKAL

SEQ ID NO: 26183 - protein, 9 aa, Homo sapiens
  AACR GENIE Results; PIK3CA_p.T1025A; A2301
AYIRKALAL

SEQ ID NO: 26184 - protein, 8 aa, Homo sapiens
  AACR GENIE Results; PIK3CA_p.T1025A; B1402
IAYIRKAL

SEQ ID NO: 26185 - protein, 9 aa, Homo sapiens
  AACR GENIE Results; PIK3CA_p.T1025A; A2402
AYIRKALAL

SEQ ID NO: 26186 - protein, 8 aa, Homo sapiens
  AACR GENIE Results; PIK3CA_p.T1025A; C0304
IAYIRKAL

SEQ ID NO: 26187 - protein, 8 aa, Homo sapiens
  AACR GENIE Results; PIK3CA_p.T1025A; C1601
IAYIRKAL

SEQ ID NO: 26188 - protein, 9 aa, Homo sapiens
  AACR GENIE Results; PIK3CA_p.V344G; A1101
ATYGNLNIR

SEQ ID NO: 26189 - protein, 9 aa, Homo sapiens
  AACR GENIE Results; PIK3CA_p.V344G; A3101
ATYGNLNIR

SEQ ID NO: 26190 - protein, 9 aa, Homo sapiens
  AACR GENIE Results; PIK3CA_p.V344G; A3303
ATYGNLNIR

SEQ ID NO: 26191 - protein, 9 aa, Homo sapiens
  AACR GENIE Results; PIK3CA_p.V344G; A6801
ATYGNLNIR

SEQ ID NO: 26192 - protein, 9 aa, Homo sapiens
  AACR GENIE Results; PIK3CA_p.V344G; A0301
ATYGNLNIR

SEQ ID NO: 26193 - protein, 8 aa, Homo sapiens
  AACR GENIE Results; PIK3CA_p.V344G; A3303
TYGNLNIR

SEQ ID NO: 26194 - protein, 8 aa, Homo sapiens
  AACR GENIE Results; PIK3CB_p.Q748H; B0801
HSAYREAL

SEQ ID NO: 26195 - protein, 9 aa, Homo sapiens
  AACR GENIE Results; PIK3CG_p.K768N; A1101
QVISQLNQK

SEQ ID NO: 26196 - protein, 9 aa, Homo sapiens
  AACR GENIE Results; PIK3CG_p.K768N; A0301
QVISQLNQK

SEQ ID NO: 26197 - protein, 11 aa, Homo sapiens
  AACR GENIE Results; PIK3CG_p.K768N; A1101
SSQVISQLNQK

SEQ ID NO: 26198 - protein, 10 aa, Homo sapiens
  AACR GENIE Results; PIK3CG_p.K768N; A1101
SQVISQLNQK

SEQ ID NO: 26199 - protein, 9 aa, Homo sapiens
  AACR GENIE Results; PIK3CG_p.K768N; B0801
QLNQKLENL

SEQ ID NO: 26200 - protein, 9 aa, Homo sapiens
  AACR GENIE Results; PIK3R1_p.D560H; B0801
EIHKRMNSI

SEQ ID NO: 26201 - protein, 9 aa, Homo sapiens
  AACR GENIE Results; PIK3R1_p.D560Y; C1601
QAAEYREIY

SEQ ID NO: 26202 - protein, 9 aa, Homo sapiens
  AACR GENIE Results; PIK3R1_p.D560Y; B3501
QAAEYREIY

SEQ ID NO: 26203 - protein, 9 aa, Homo sapiens
  AACR GENIE Results; PIK3R1_p.D560Y; B0801
EIYKRMNSI

SEQ ID NO: 26204 - protein, 9 aa, Homo sapiens
  AACR GENIE Results; PIK3R1_p.D560Y; B1501
QAAEYREIY

SEQ ID NO: 26205 - protein, 9 aa, Homo sapiens
  AACR GENIE Results; PIK3R1_p.D560Y; C1203
QAAEYREIY

SEQ ID NO: 26206 - protein, 9 aa, Homo sapiens
  AACR GENIE Results; PIK3R1_p.D560Y; B1402
EIYKRMNSI

SEQ ID NO: 26207 - protein, 9 aa, Homo sapiens
  AACR GENIE Results; PIK3R1_p.D560Y; C0202
QAAEYREIY

SEQ ID NO: 26208 - protein, 9 aa, Homo sapiens
  AACR GENIE Results; PIK3R1_p.D560Y; A1101
AAEYREIYK

SEQ ID NO: 26209 - protein, 8 aa, Homo sapiens
  AACR GENIE Results; PIK3R1_p.D560Y; C1601
AAEYREIY

SEQ ID NO: 26210 - protein, 10 aa, Homo sapiens
  AACR GENIE Results; PIK3R1_p.D560Y; A1101
QAAEYREIYK

SEQ ID NO: 26211 - protein, 10 aa, Homo sapiens
  AACR GENIE Results; PIK3R1_p.D560Y; A6801
QAAEYREIYK

SEQ ID NO: 26212 - protein, 9 aa, Homo sapiens
  AACR GENIE Results; PIK3R1_p.E666K; A1101
SVVVDGKVK

SEQ ID NO: 26213 - protein, 9 aa, Homo sapiens
  AACR GENIE Results; PIK3R1_p.E666K; A1101
ACSVVVDGK

SEQ ID NO: 26214 - protein, 9 aa, Homo sapiens
  AACR GENIE Results; PIK3R1_p.E666K; A0301
SVVVDGKVK

SEQ ID NO: 26215 - protein, 9 aa, Homo sapiens
  AACR GENIE Results; PIK3R1_p.E666K; A6801
SVVVDGKVK

SEQ ID NO: 26216 - protein, 8 aa, Homo sapiens
  AACR GENIE Results; PIK3R1_p.E666K; A1101
VVVDGKVK

SEQ ID NO: 26217 - protein, 8 aa, Homo sapiens
  AACR GENIE Results; PIK3R1_p.E666K; B1302
SVVVDGKV

SEQ ID NO: 26218 - protein, 9 aa, Homo sapiens
  AACR GENIE Results; PIK3R1_p.E666K; A0301
KVKHCVINK

SEQ ID NO: 26219 - protein, 8 aa, Homo sapiens
  AACR GENIE Results; PIK3R1_p.E666K; B0801
DGKVKHCV

SEQ ID NO: 26220 - protein, 9 aa, Homo sapiens
  AACR GENIE Results; PIK3R1_p.G376R; C0602
GRNNKLIKI

SEQ ID NO: 26221 - protein, 11 aa, Homo sapiens
  AACR GENIE Results; PIK3R1_p.K567E; A6801
NSIEPDLIQLR

SEQ ID NO: 26222 - protein, 11 aa, Homo sapiens
  AACR GENIE Results; PIK3R1_p.K567E; A3303
NSIEPDLIQLR

SEQ ID NO: 26223 - protein, 11 aa, Homo sapiens
  AACR GENIE Results; PIK3R1_p.K567E; A3101
NSIEPDLIQLR

SEQ ID NO: 26224 - protein, 11 aa, Homo sapiens
  AACR GENIE Results; PIK3R1_p.K567E; A6802
NSIEPDLIQLR

SEQ ID NO: 26225 - protein, 10 aa, Homo sapiens
  AACR GENIE Results; PIK3R1_p.K567E; A6802
NSIEPDLIQL

SEQ ID NO: 26226 - protein, 8 aa, Homo sapiens
  AACR GENIE Results; PIK3R1_p.K567E; B4002
IEPDLIQL

SEQ ID NO: 26227 - protein, 10 aa, Homo sapiens
  AACR GENIE Results; PIK3R1_p.K567E; B3503
NSIEPDLIQL

SEQ ID NO: 26228 - protein, 10 aa, Homo sapiens
  AACR GENIE Results; PIK3R1_p.K567E; A6801
SIEPDLIQLR

SEQ ID NO: 26229 - protein, 9 aa, Homo sapiens
  AACR GENIE Results; PIK3R1_p.K567E; B3503
SIEPDLIQL

SEQ ID NO: 26230 - protein, 9 aa, Homo sapiens
  AACR GENIE Results; PIK3R1_p.K567E; A6801
IEPDLIQLR

SEQ ID NO: 26231 - protein, 11 aa, Homo sapiens
  AACR GENIE Results; PIK3R1_p.K567E; B5701
NSIEPDLIQLR

SEQ ID NO: 26232 - protein, 10 aa, Homo sapiens
  AACR GENIE Results; PIK3R1_p.K567E; A3303
SIEPDLIQLR

SEQ ID NO: 26233 - protein, 9 aa, Homo sapiens
  AACR GENIE Results; PIK3R1_p.K567E; A3303
IEPDLIQLR

SEQ ID NO: 26234 - protein, 8 aa, Homo sapiens
  AACR GENIE Results; PIK3R1_p.K567E; B4001
IEPDLIQL

SEQ ID NO: 26235 - protein, 11 aa, Homo sapiens
  AACR GENIE Results; PIK3R1_p.K567E; A1101
NSIEPDLIQLR

SEQ ID NO: 26236 - protein, 9 aa, Homo sapiens
  AACR GENIE Results; PIK3R1_p.K567E; B2702
IEPDLIQLR

SEQ ID NO: 26237 - protein, 8 aa, Homo sapiens
  AACR GENIE Results; PIK3R1_p.S208Y; B5101
MIYLAPEV

SEQ ID NO: 26238 - protein, 9 aa, Homo sapiens
  AACR GENIE Results; PIK3R1_p.S208Y; A0201
EMIYLAPEV

SEQ ID NO: 26239 - protein, 9 aa, Homo sapiens
  AACR GENIE Results; PIK3R1_p.S208Y; A2601
EMIYLAPEV

SEQ ID NO: 26240 - protein, 9 aa, Homo sapiens
  AACR GENIE Results; PLCG2_p.P283H; B1501
TMRETAEHF

SEQ ID NO: 26241 - protein, 9 aa, Homo sapiens
  AACR GENIE Results; PLCG2_p.P283H; A2601
ETAEHFLFV

SEQ ID NO: 26242 - protein, 10 aa, Homo sapiens
  AACR GENIE Results; PLCG2_p.V755I; B2702
DINSLYDISR

SEQ ID NO: 26243 - protein, 10 aa, Homo sapiens
  AACR GENIE Results; PLCG2_p.V755I; A6801
DINSLYDISR

SEQ ID NO: 26244 - protein, 10 aa, Homo sapiens
  AACR GENIE Results; PLCG2_p.V755I; A0201
SLYDISRMYV

SEQ ID NO: 26245 - protein, 9 aa, Homo sapiens
  AACR GENIE Results; PLCG2_p.V755I; A2902
SLYDISRMY

SEQ ID NO: 26246 - protein, 9 aa, Homo sapiens
  AACR GENIE Results; PLCG2_p.V755I; A0301
SLYDISRMY

SEQ ID NO: 26247 - protein, 9 aa, Homo sapiens
  AACR GENIE Results; PLCG2_p.V755I; B1501
SLYDISRMY

SEQ ID NO: 26248 - protein, 8 aa, Homo sapiens
  AACR GENIE Results; PMS1_p.Q698L; B0801
SQNIKMVL

SEQ ID NO: 26249 - protein, 9 aa, Homo sapiens
  AACR GENIE Results; PMS1_p.Q698L; A0301
MVLIPFSMK

SEQ ID NO: 26250 - protein, 8 aa, Homo sapiens
  AACR GENIE Results; PMS1_p.Q698L; B1501
SQNIKMVL

SEQ ID NO: 26251 - protein, 9 aa, Homo sapiens
  AACR GENIE Results; PNRC1_p.S262L; B4001
TENIKNLHL

SEQ ID NO: 26252 - protein, 9 aa, Homo sapiens
  AACR GENIE Results; PNRC1_p.S262L; B4403
TENIKNLHL

SEQ ID NO: 26253 - protein, 9 aa, Homo sapiens
  AACR GENIE Results; PNRC1_p.S262L; B0801
TENIKNLHL

SEQ ID NO: 26254 - protein, 9 aa, Homo sapiens
  AACR GENIE Results; PNRC1_p.S262L; B4402
TENIKNLHL

SEQ ID NO: 26255 - protein, 9 aa, Homo sapiens
  AACR GENIE Results; PNRC1_p.S262L; B0702
TENIKNLHL

SEQ ID NO: 26256 - protein, 9 aa, Homo sapiens
  AACR GENIE Results; PNRC1_p.S262L; B0801
NLHLKKSAF

SEQ ID NO: 26257 - protein, 9 aa, Homo sapiens
  AACR GENIE Results; POLD1_p.G184V; B4001
RELTVPAVL

SEQ ID NO: 26258 - protein, 9 aa, Homo sapiens
  AACR GENIE Results; POLD1_p.G184V; B3501
VPAVLAVEL

SEQ ID NO: 26259 - protein, 9 aa, Homo sapiens
  AACR GENIE Results; POLD1_p.G184V; B0702
VPAVLAVEL

SEQ ID NO: 26260 - protein, 9 aa, Homo sapiens
  AACR GENIE Results; POLD1_p.G184V; A3001
RELTVPAVL

SEQ ID NO: 26261 - protein, 10 aa, Homo sapiens
  AACR GENIE Results; POLD1_p.G184V; A6801
TVPAVLAVEL

SEQ ID NO: 26262 - protein, 9 aa, Homo sapiens
  AACR GENIE Results; POLD1_p.G184V; C1502
LTVPAVLAV

SEQ ID NO: 26263 - protein, 8 aa, Homo sapiens
  AACR GENIE Results; POLD1_p.G184V; B5101
TVPAVLAV

SEQ ID NO: 26264 - protein, 9 aa, Homo sapiens
  AACR GENIE Results; POLD1_p.G184V; A2301
RELTVPAVL

SEQ ID NO: 26265 - protein, 9 aa, Homo sapiens
  AACR GENIE Results; POLD1_p.G184V; B4403
RELTVPAVL

SEQ ID NO: 26266 - protein, 9 aa, Homo sapiens
  AACR GENIE Results; POLD1_p.G184V; B2705
GRELTVPAV

SEQ ID NO: 26267 - protein, 9 aa, Homo sapiens
  AACR GENIE Results; POLE_p.P286R; A3101
TTKLPLKFR

SEQ ID NO: 26268 - protein, 9 aa, Homo sapiens
  AACR GENIE Results; POLE_p.P286R; B3801
FRDAETDQI

SEQ ID NO: 26269 - protein, 9 aa, Homo sapiens
  AACR GENIE Results; PPP2R1A_p.R183W; B5501
TPMVRWAAA

SEQ ID NO: 26270 - protein, 9 aa, Homo sapiens
  AACR GENIE Results; PPP2R1A_p.R183W; B4403
SDDTPMVRW

SEQ ID NO: 26271 - protein, 10 aa, Homo sapiens
  AACR GENIE Results; PPP2R1A_p.R183W; B5701
CSDDTPMVRW

SEQ ID NO: 26272 - protein, 9 aa, Homo sapiens
  AACR GENIE Results; PPP2R1A_p.R183W; B4402
SDDTPMVRW

SEQ ID NO: 26273 - protein, 8 aa, Homo sapiens
  AACR GENIE Results; PPP2R1A_p.R183W; A2301
DDTPMVRW

SEQ ID NO: 26274 - protein, 9 aa, Homo sapiens
  AACR GENIE Results; PPP2R1A_p.R183W; B0702
TPMVRWAAA

SEQ ID NO: 26275 - protein, 8 aa, Homo sapiens
  AACR GENIE Results; PPP2R1A_p.R183W; B5501
TPMVRWAA

SEQ ID NO: 26276 - protein, 9 aa, Homo sapiens
  AACR GENIE Results; PPP2R1A_p.R183W; B0801
TPMVRWAAA

SEQ ID NO: 26277 - protein, 9 aa, Homo sapiens
  AACR GENIE Results; PPP2R1A_p.R183W; A6802
DTPMVRWAA

SEQ ID NO: 26278 - protein, 10 aa, Homo sapiens
  AACR GENIE Results; PPP2R1A_p.R183W; B4403
CSDDTPMVRW

SEQ ID NO: 26279 - protein, 9 aa, Homo sapiens
  AACR GENIE Results; PPP2R1A_p.R183W; B2705
VRWAAASKL

SEQ ID NO: 26280 - protein, 8 aa, Homo sapiens
  AACR GENIE Results; PPP2R1A_p.R183W; B4403
DDTPMVRW

SEQ ID NO: 26281 - protein, 9 aa, Homo sapiens
  AACR GENIE Results; PTCH1_p.R571Q; B3501
IPIPALQAF

SEQ ID NO: 26282 - protein, 9 aa, Homo sapiens
  AACR GENIE Results; PTCH1_p.R571Q; B0702
IPIPALQAF

SEQ ID NO: 26283 - protein, 11 aa, Homo sapiens
  AACR GENIE Results; PTCH1_p.R571Q; B1501
ALIPIPALQAF

SEQ ID NO: 26284 - protein, 9 aa, Homo sapiens
  AACR GENIE Results; PTCH1_p.R571Q; B1501
IPIPALQAF

SEQ ID NO: 26285 - protein, 9 aa, Homo sapiens
  AACR GENIE Results; PTCH1_p.R571Q; B5101
IPIPALQAF

SEQ ID NO: 26286 - protein, 10 aa, Homo sapiens
  AACR GENIE Results; PTCH1_p.R571Q; C0102
LIPIPALQAF

SEQ ID NO: 26287 - protein, 9 aa, Homo sapiens
  AACR GENIE Results; PTEN_p.D92N; B3901
NHNPPQLEL

SEQ ID NO: 26288 - protein, 9 aa, Homo sapiens
  AACR GENIE Results; PTEN_p.D92N; B3801
NHNPPQLEL

SEQ ID NO: 26289 - protein, 9 aa, Homo sapiens
  AACR GENIE Results; PTEN_p.D92N; B4001
FENHNPPQL

SEQ ID NO: 26290 - protein, 9 aa, Homo sapiens
  AACR GENIE Results; PTEN_p.D92N; B4002
FENHNPPQL

SEQ ID NO: 26291 - protein, 11 aa, Homo sapiens
  AACR GENIE Results; PTEN_p.D92N; B3503
YPFENHNPPQL

SEQ ID NO: 26292 - protein, 9 aa, Homo sapiens
  AACR GENIE Results; PTEN_p.D92N; A3001
FENHNPPQL

SEQ ID NO: 26293 - protein, 9 aa, Homo sapiens
  AACR GENIE Results; PTEN_p.D92N; B4901
FENHNPPQL

SEQ ID NO: 26294 - protein, 10 aa, Homo sapiens
  AACR GENIE Results; PTEN_p.D92N; B3801
NHNPPQLELI

SEQ ID NO: 26295 - protein, 11 aa, Homo sapiens
  AACR GENIE Results; PTEN_p.D92N; B3501
YPFENHNPPQL

SEQ ID NO: 26296 - protein, 11 aa, Homo sapiens
  AACR GENIE Results; PTEN_p.D92N; B0702
YPFENHNPPQL

SEQ ID NO: 26297 - protein, 9 aa, Homo sapiens
  AACR GENIE Results; PTEN_p.D92N; B5801
FENHNPPQL

SEQ ID NO: 26298 - protein, 9 aa, Homo sapiens
  AACR GENIE Results; PTEN_p.D92N; B3503
NHNPPQLEL

SEQ ID NO: 26299 - protein, 9 aa, Homo sapiens
  AACR GENIE Results; PTEN_p.D92N; B4403
FENHNPPQL

SEQ ID NO: 26300 - protein, 11 aa, Homo sapiens
  AACR GENIE Results; PTEN_p.D92N; B5101
YPFENHNPPQL

SEQ ID NO: 26301 - protein, 9 aa, Homo sapiens
  AACR GENIE Results; PTEN_p.D92N; B0702
FENHNPPQL

SEQ ID NO: 26302 - protein, 9 aa, Homo sapiens
  AACR GENIE Results; PTEN_p.G165E; A6801
EVTIPSQRR

SEQ ID NO: 26303 - protein, 8 aa, Homo sapiens
  AACR GENIE Results; PTEN_p.G165E; A6801
EVTIPSQR

SEQ ID NO: 26304 - protein, 9 aa, Homo sapiens
  AACR GENIE Results; PTEN_p.G165E; B3801
TRDKKEVTI

SEQ ID NO: 26305 - protein, 9 aa, Homo sapiens
  AACR GENIE Results; PTEN_p.H93R; B4001
FEDRNPPQL

SEQ ID NO: 26306 - protein, 11 aa, Homo sapiens
  AACR GENIE Results; PTEN_p.H93R; B0702
YPFEDRNPPQL

SEQ ID NO: 26307 - protein, 11 aa, Homo sapiens
  AACR GENIE Results; PTEN_p.H93R; B3501
YPFEDRNPPQL

SEQ ID NO: 26308 - protein, 9 aa, Homo sapiens
  AACR GENIE Results; PTEN_p.H93R; B3501
YPFEDRNPP

SEQ ID NO: 26309 - protein, 8 aa, Homo sapiens
  AACR GENIE Results; PTEN_p.M134I; B1801
TGVIICAY

SEQ ID NO: 26310 - protein, 8 aa, Homo sapiens
  AACR GENIE Results; PTEN_p.P246L; B5501
FPQLLPVC

SEQ ID NO: 26311 - protein, 9 aa, Homo sapiens
  AACR GENIE Results; PTEN_p.P246L; C0602
MYFEFPQLL

SEQ ID NO: 26312 - protein, 9 aa, Homo sapiens
  AACR GENIE Results; PTEN_p.P246L; A2402
MYFEFPQLL

SEQ ID NO: 26313 - protein, 9 aa, Homo sapiens
  AACR GENIE Results; PTEN_p.P246L; A2301
MYFEFPQLL

SEQ ID NO: 26314 - protein, 9 aa, Homo sapiens
  AACR GENIE Results; PTEN_p.P246L; B4901
FEFPQLLPV

SEQ ID NO: 26315 - protein, 9 aa, Homo sapiens
  AACR GENIE Results; PTEN_p.P246L; C1402
MYFEFPQLL

SEQ ID NO: 26316 - protein, 9 aa, Homo sapiens
  AACR GENIE Results; PTEN_p.R130Q; B1302
GQTGVMICA

SEQ ID NO: 26317 - protein, 9 aa, Homo sapiens
  AACR GENIE Results; PTEN_p.R130Q; A0205
GQTGVMICA

SEQ ID NO: 26318 - protein, 10 aa, Homo sapiens
  AACR GENIE Results; PTEN_p.R130Q; B1501
GQTGVMICAY

SEQ ID NO: 26319 - protein, 9 aa, Homo sapiens
  AACR GENIE Results; PTEN_p.R130Q; B5001
GQTGVMICA

SEQ ID NO: 26320 - protein, 10 aa, Homo sapiens
  AACR GENIE Results; PTEN_p.R130Q; A3002
GQTGVMICAY

SEQ ID NO: 26321 - protein, 8 aa, Homo sapiens
  AACR GENIE Results; PTEN_p.R130Q; B1302
GQTGVMIC

SEQ ID NO: 26322 - protein, 9 aa, Homo sapiens
  AACR GENIE Results; PTEN_p.R130Q; B1501
AGKGQTGVM

SEQ ID NO: 26323 - protein, 9 aa, Homo sapiens
  AACR GENIE Results; PTEN_p.R173C; B1501
VTIPSQRCY

SEQ ID NO: 26324 - protein, 9 aa, Homo sapiens
  AACR GENIE Results; PTEN_p.R173C; C1601
VTIPSQRCY

SEQ ID NO: 26325 - protein, 9 aa, Homo sapiens
  AACR GENIE Results; PTEN_p.R173C; B5701
VTIPSQRCY

SEQ ID NO: 26326 - protein, 9 aa, Homo sapiens
  AACR GENIE Results; PTEN_p.R173C; C0202
VTIPSQRCY

SEQ ID NO: 26327 - protein, 9 aa, Homo sapiens
  AACR GENIE Results; PTPN11_p.G503V; B1501
VMVQTEAQY

SEQ ID NO: 26328 - protein, 11 aa, Homo sapiens
  AACR GENIE Results; PTPN11_p.G503V; A1101
SVMVQTEAQYR

SEQ ID NO: 26329 - protein, 11 aa, Homo sapiens
  AACR GENIE Results; PTPN11_p.G503V; A3101
SVMVQTEAQYR

SEQ ID NO: 26330 - protein, 11 aa, Homo sapiens
  AACR GENIE Results; PTPN11_p.G503V; A6801
SVMVQTEAQYR

SEQ ID NO: 26331 - protein, 10 aa, Homo sapiens
  AACR GENIE Results; PTPN11_p.G503V; B1501
SVMVQTEAQY

SEQ ID NO: 26332 - protein, 9 aa, Homo sapiens
  AACR GENIE Results; PTPN11_p.G503V; A2902
VMVQTEAQY

SEQ ID NO: 26333 - protein, 9 aa, Homo sapiens
  AACR GENIE Results; PTPN11_p.Q510H; B1501
GMVQTEAHY

SEQ ID NO: 26334 - protein, 9 aa, Homo sapiens
  AACR GENIE Results; PTPN11_p.V505I; B1501
GMIQTEAQY

SEQ ID NO: 26335 - protein, 9 aa, Homo sapiens
  AACR GENIE Results; PTPN11_p.V505I; A2902
GMIQTEAQY

SEQ ID NO: 26336 - protein, 9 aa, Homo sapiens
  AACR GENIE Results; PTPN11_p.V505I; A6801
MIQTEAQYR

SEQ ID NO: 26337 - protein, 9 aa, Homo sapiens
  AACR GENIE Results; PTPRD_p.D1393Y; C0304
IAYYHSRVL

SEQ ID NO: 26338 - protein, 9 aa, Homo sapiens
  AACR GENIE Results; PTPRD_p.D1393Y; C0303
IAYYHSRVL

SEQ ID NO: 26339 - protein, 9 aa, Homo sapiens
  AACR GENIE Results; PTPRD_p.D1393Y; C1203
IAYYHSRVL

SEQ ID NO: 26340 - protein, 9 aa, Homo sapiens
  AACR GENIE Results; PTPRD_p.D1393Y; C1601
IAYYHSRVL

SEQ ID NO: 26341 - protein, 9 aa, Homo sapiens
  AACR GENIE Results; PTPRD_p.D778Y; C0401
FYDTTEHDM

SEQ ID NO: 26342 - protein, 9 aa, Homo sapiens
  AACR GENIE Results; PTPRD_p.G38V; B1501
GVSVGVASF

SEQ ID NO: 26343 - protein, 10 aa, Homo sapiens
  AACR GENIE Results; PTPRD_p.G38V; B0702
TPVDQTGVSV

SEQ ID NO: 26344 - protein, 10 aa, Homo sapiens
  AACR GENIE Results; PTPRD_p.R377L; A0101
EIDGVATTLY

SEQ ID NO: 26345 - protein, 9 aa, Homo sapiens
  AACR GENIE Results; PTPRD_p.R377L; A0201
GVATTLYSV

SEQ ID NO: 26346 - protein, 11 aa, Homo sapiens
  AACR GENIE Results; PTPRD_p.R377L; B4402
KEIDGVATTLY

SEQ ID NO: 26347 - protein, 10 aa, Homo sapiens
  AACR GENIE Results; PTPRD_p.R377L; B4402
KEIDGVATTL

SEQ ID NO: 26348 - protein, 10 aa, Homo sapiens
  AACR GENIE Results; PTPRD_p.R427Q; B0702
APRDVQAQML

SEQ ID NO: 26349 - protein, 9 aa, Homo sapiens
  AACR GENIE Results; PTPRD_p.R427Q; B0702
APRDVQAQM

SEQ ID NO: 26350 - protein, 9 aa, Homo sapiens
  AACR GENIE Results; PTPRD_p.R427Q; B1501
AQMLSSTTI

SEQ ID NO: 26351 - protein, 10 aa, Homo sapiens
  AACR GENIE Results; PTPRD_p.V635L; A1101
VSWQPPPLEK

SEQ ID NO: 26352 - protein, 10 aa, Homo sapiens
  AACR GENIE Results; PTPRD_p.V635L; A0301
VSWQPPPLEK

SEQ ID NO: 26353 - protein, 11 aa, Homo sapiens
  AACR GENIE Results; PTPRS_p.V267M; B3501
MPGGNVNITCM

SEQ ID NO: 26354 - protein, 9 aa, Homo sapiens
  AACR GENIE Results; PTPRS_p.V267M; B3501
MAVGSPMPY

SEQ ID NO: 26355 - protein, 9 aa, Homo sapiens
  AACR GENIE Results; PTPRT_p.S84Y; B1501
MVNSSGRAY

SEQ ID NO: 26356 - protein, 10 aa, Homo sapiens
  AACR GENIE Results; PTPRT_p.S84Y; B1501
MMVNSSGRAY

SEQ ID NO: 26357 - protein, 9 aa, Homo sapiens
  AACR GENIE Results; PTPRT_p.S84Y; B3501
MVNSSGRAY

SEQ ID NO: 26358 - protein, 11 aa, Homo sapiens
  AACR GENIE Results; PTPRT_p.S84Y; B1501
FMMVNSSGRAY

SEQ ID NO: 26359 - protein, 9 aa, Homo sapiens
  AACR GENIE Results; PTPRT_p.S84Y; A2402
AYGQKAHLL

SEQ ID NO: 26360 - protein, 9 aa, Homo sapiens
  AACR GENIE Results; RAF1_p.S257L; B2705
QRLTSTPNV

SEQ ID NO: 26361 - protein, 8 aa, Homo sapiens
  AACR GENIE Results; RAF1_p.S259F; B1501
SQRQRSTF

SEQ ID NO: 26362 - protein, 10 aa, Homo sapiens
  AACR GENIE Results; RASA1_p.R427Q; B1501
YQKEQIVEGY

SEQ ID NO: 26363 - protein, 9 aa, Homo sapiens
  AACR GENIE Results; RB1_p.A18S; A1101
ASEPPAPPP

SEQ ID NO: 26364 - protein, 9 aa, Homo sapiens
  AACR GENIE Results; RB1_p.A18S; A3001
SEPPAPPPP

SEQ ID NO: 26365 - protein, 9 aa, Homo sapiens
  AACR GENIE Results; RB1_p.G310E; B4001
NELPEVENL

SEQ ID NO: 26366 - protein, 11 aa, Homo sapiens
  AACR GENIE Results; RB1_p.G310E; A0201
GLVTSNELPEV

SEQ ID NO: 26367 - protein, 11 aa, Homo sapiens
  AACR GENIE Results; RB1_p.G310E; A6801
ELPEVENLSKR

SEQ ID NO: 26368 - protein, 10 aa, Homo sapiens
  AACR GENIE Results; RB1_p.G310E; A6801
ELPEVENLSK

SEQ ID NO: 26369 - protein, 9 aa, Homo sapiens
  AACR GENIE Results; RB1_p.G310E; A3001
NELPEVENL

SEQ ID NO: 26370 - protein, 9 aa, Homo sapiens
  AACR GENIE Results; RB1_p.G310E; B1801
NELPEVENL

SEQ ID NO: 26371 - protein, 9 aa, Homo sapiens
  AACR GENIE Results; RB1_p.G310E; A2301
NELPEVENL

SEQ ID NO: 26372 - protein, 9 aa, Homo sapiens
  AACR GENIE Results; RB1_p.G310E; B3801
NELPEVENL

SEQ ID NO: 26373 - protein, 9 aa, Homo sapiens
  AACR GENIE Results; RB1_p.G310E; B4403
NELPEVENL

SEQ ID NO: 26374 - protein, 9 aa, Homo sapiens
  AACR GENIE Results; RB1_p.G310E; A0201
VTSNELPEV

SEQ ID NO: 26375 - protein, 9 aa, Homo sapiens
  AACR GENIE Results; RB1_p.G310E; B4901
NELPEVENL

SEQ ID NO: 26376 - protein, 9 aa, Homo sapiens
  AACR GENIE Results; RB1_p.P21Rfs*44; A0301
CLSSGLSLK

SEQ ID NO: 26377 - protein, 9 aa, Homo sapiens
  AACR GENIE Results; RB1_p.P21Rfs*44; A1101
LSSGLSLKK

SEQ ID NO: 26378 - protein, 8 aa, Homo sapiens
  AACR GENIE Results; RB1_p.P21Rfs*44; A1101
SSGLSLKK

SEQ ID NO: 26379 - protein, 10 aa, Homo sapiens
  AACR GENIE Results; RB1_p.P21Rfs*44; A0301
CLSSGLSLKK

SEQ ID NO: 26380 - protein, 9 aa, Homo sapiens
  AACR GENIE Results; RB1_p.P21Rfs*44; A0301
LSSGLSLKK

SEQ ID NO: 26381 - protein, 9 aa, Homo sapiens
  AACR GENIE Results; RB1_p.P21Rfs*44; C0304
TCLSSGLSL

SEQ ID NO: 26382 - protein, 9 aa, Homo sapiens
  AACR GENIE Results; RB1_p.P21Rfs*44; A1101
CLSSGLSLK

SEQ ID NO: 26383 - protein, 8 aa, Homo sapiens
  AACR GENIE Results; RB1_p.P21Rfs*44; B0801
TAARRTCL

SEQ ID NO: 26384 - protein, 9 aa, Homo sapiens
  AACR GENIE Results; RB1_p.P21Rfs*44; C1502
KNLILLHYV

SEQ ID NO: 26385 - protein, 8 aa, Homo sapiens
  AACR GENIE Results; RB1_p.P21Rfs*44; A1101
LSSGLSLK

SEQ ID NO: 26386 - protein, 10 aa, Homo sapiens
  AACR GENIE Results; RB1_p.P21Rfs*44; A0301
TCLSSGLSLK

SEQ ID NO: 26387 - protein, 11 aa, Homo sapiens
  AACR GENIE Results; RB1_p.P21Rfs*44; A0301
RTCLSSGLSLK

SEQ ID NO: 26388 - protein, 9 aa, Homo sapiens
  AACR GENIE Results; RB1_p.P21Rfs*44; C0303
TCLSSGLSL

SEQ ID NO: 26389 - protein, 9 aa, Homo sapiens
  AACR GENIE Results; RB1_p.P21Rfs*44; A3101
RTQSRTAAR

SEQ ID NO: 26390 - protein, 9 aa, Homo sapiens
  AACR GENIE Results; RB1_p.P21Rfs*44; A3101
KQKNLILLH

SEQ ID NO: 26391 - protein, 9 aa, Homo sapiens
  AACR GENIE Results; RB1_p.P21Rfs*44; A6801
LSSGLSLKK

SEQ ID NO: 26392 - protein, 8 aa, Homo sapiens
  AACR GENIE Results; RB1_p.P21Rfs*44; A0301
SSGLSLKK

SEQ ID NO: 26393 - protein, 8 aa, Homo sapiens
  AACR GENIE Results; RB1_p.P21Rfs*44; A0301
LSSGLSLK

SEQ ID NO: 26394 - protein, 8 aa, Homo sapiens
  AACR GENIE Results; RB1_p.R579Q; B4001
QEGPTDHL

SEQ ID NO: 26395 - protein, 9 aa, Homo sapiens
  AACR GENIE Results; RB1_p.R579Q; B3801
DQEGPTDHL

SEQ ID NO: 26396 - protein, 9 aa, Homo sapiens
  AACR GENIE Results; RB1_p.R579Q; C0802
DQEGPTDHL

SEQ ID NO: 26397 - protein, 11 aa, Homo sapiens
  AACR GENIE Results; RB1_p.R798W; B3501
SPLWIPGGNIY

SEQ ID NO: 26398 - protein, 10 aa, Homo sapiens
  AACR GENIE Results; RB1_p.R798W; C0602
YKFPSSPLWI

SEQ ID NO: 26399 - protein, 9 aa, Homo sapiens
  AACR GENIE Results; RB1_p.V654L; A3101
SLFYKKLYR

SEQ ID NO: 26400 - protein, 9 aa, Homo sapiens
  AACR GENIE Results; RB1_p.V654L; B5701
LSLFYKKLY

SEQ ID NO: 26401 - protein, 9 aa, Homo sapiens
  AACR GENIE Results; RBM10_p.G374V; A2601
DVKTINVEF

SEQ ID NO: 26402 - protein, 8 aa, Homo sapiens
  AACR GENIE Results; RBM10_p.G374V; B5101
HPPLTIDV

SEQ ID NO: 26403 - protein, 9 aa, Homo sapiens
  AACR GENIE Results; RBM10_p.G374V; B3501
DVKTINVEF

SEQ ID NO: 26404 - protein, 9 aa, Homo sapiens
  AACR GENIE Results; RBM10_p.G374V; C0501
TIDVKTINV

SEQ ID NO: 26405 - protein, 9 aa, Homo sapiens
  AACR GENIE Results; RBM10_p.G374V; B0801
DVKTINVEF

SEQ ID NO: 26406 - protein, 9 aa, Homo sapiens
  AACR GENIE Results; RBM10_p.G374V; B1501
DVKTINVEF

SEQ ID NO: 26407 - protein, 9 aa, Homo sapiens
  AACR GENIE Results; RBM10_p.G374V; A0201
TIDVKTINV

SEQ ID NO: 26408 - protein, 11 aa, Homo sapiens
  AACR GENIE Results; RBM10_p.G374V; B5101
HPPLTIDVKTI

SEQ ID NO: 26409 - protein, 11 aa, Homo sapiens
  AACR GENIE Results; RBM10_p.R685L; B1501
RLESATADAGY

SEQ ID NO: 26410 - protein, 10 aa, Homo sapiens
  AACR GENIE Results; RBM10_p.R685L; B4403
LESATADAGY

SEQ ID NO: 26411 - protein, 10 aa, Homo sapiens
  AACR GENIE Results; RBM10_p.R766P; B0702
RPQFPSKEAL

SEQ ID NO: 26412 - protein, 9 aa, Homo sapiens
  AACR GENIE Results; RBM10_p.R766P; B0702
RPQFPSKEA

SEQ ID NO: 26413 - protein, 9 aa, Homo sapiens
  AACR GENIE Results; RBM10_p.R766P; B1501
PQFPSKEAL

SEQ ID NO: 26414 - protein, 9 aa, Homo sapiens
  AACR GENIE Results; RBM10_p.T371Nfs*10; A0301
ALHPPLNYR

SEQ ID NO: 26415 - protein, 8 aa, Homo sapiens
  AACR GENIE Results; RBM10_p.T371Nfs*10; A0301
ALHPPLNY

SEQ ID NO: 26416 - protein, 9 aa, Homo sapiens
  AACR GENIE Results; RBM10_p.T371Nfs*10; B3501
QALHPPLNY

SEQ ID NO: 26417 - protein, 8 aa, Homo sapiens
  AACR GENIE Results; RBM10_p.T371Nfs*10; B1501
ALHPPLNY

SEQ ID NO: 26418 - protein, 10 aa, Homo sapiens
  AACR GENIE Results; RBM10_p.T371Nfs*10; B1501
LQALHPPLNY

SEQ ID NO: 26419 - protein, 11 aa, Homo sapiens
  AACR GENIE Results; RECQL4_p.G120R; A1101
GTLQARPALGR

SEQ ID NO: 26420 - protein, 9 aa, Homo sapiens
  AACR GENIE Results; RECQL4_p.G120R; B0702
GTLQARPAL

SEQ ID NO: 26421 - protein, 9 aa, Homo sapiens
  AACR GENIE Results; RECQL4_p.Q595P; B3701
AAPLPPVAF

SEQ ID NO: 26422 - protein, 9 aa, Homo sapiens
  AACR GENIE Results; RECQL4_p.Q595P; B5501
APLPPVAFA

SEQ ID NO: 26423 - protein, 9 aa, Homo sapiens
  AACR GENIE Results; RECQL4_p.Q595P; C0102
AAPLPPVAF

SEQ ID NO: 26424 - protein, 8 aa, Homo sapiens
  AACR GENIE Results; RECQL4_p.Q595P; B3501
APLPPVAF

SEQ ID NO: 26425 - protein, 9 aa, Homo sapiens
  AACR GENIE Results; RECQL4_p.R894K; B0702
APGPKRVCM

SEQ ID NO: 26426 - protein, 9 aa, Homo sapiens
  AACR GENIE Results; RECQL4_p.R894K; C1203
QAAPGPKRV

SEQ ID NO: 26427 - protein, 9 aa, Homo sapiens
  AACR GENIE Results; RECQL4_p.R894K; B5101
QAAPGPKRV

SEQ ID NO: 26428 - protein, 10 aa, Homo sapiens
  AACR GENIE Results; REL_p.S422L; B0702
TPRLGNTNPL

SEQ ID NO: 26429 - protein, 9 aa, Homo sapiens
  AACR GENIE Results; REL_p.S422L; B0702
SVAHPTPRL

SEQ ID NO: 26430 - protein, 8 aa, Homo sapiens
  AACR GENIE Results; REL_p.S422L; C0304
VAHPTPRL

SEQ ID NO: 26431 - protein, 8 aa, Homo sapiens
  AACR GENIE Results; REL_p.S422L; B5101
VAHPTPRL

SEQ ID NO: 26432 - protein, 9 aa, Homo sapiens
  AACR GENIE Results; REL_p.S422L; A1101
SVAHPTPRL

SEQ ID NO: 26433 - protein, 8 aa, Homo sapiens
  AACR GENIE Results; REL_p.S422L; C0303
VAHPTPRL

SEQ ID NO: 26434 - protein, 9 aa, Homo sapiens
  AACR GENIE Results; REL_p.S440L; B0702
STRTLPSNL

SEQ ID NO: 26435 - protein, 8 aa, Homo sapiens
  AACR GENIE Results; RET_p.R348Q; B1501
VQATVHDY

SEQ ID NO: 26436 - protein, 9 aa, Homo sapiens
  AACR GENIE Results; RET_p.R348Q; B1501
FVQATVHDY

SEQ ID NO: 26437 - protein, 9 aa, Homo sapiens
  AACR GENIE Results; RET_p.R348Q; A2902
FVQATVHDY

SEQ ID NO: 26438 - protein, 9 aa, Homo sapiens
  AACR GENIE Results; RET_p.R348Q; B3501
FVQATVHDY

SEQ ID NO: 26439 - protein, 10 aa, Homo sapiens
  AACR GENIE Results; RET_p.R348Q; A2902
SFVQATVHDY

SEQ ID NO: 26440 - protein, 9 aa, Homo sapiens
  AACR GENIE Results; RET_p.R348Q; A2601
FVQATVHDY

SEQ ID NO: 26441 - protein, 9 aa, Homo sapiens
  AACR GENIE Results; RHEB_p.S16F; C0602
YRFVGKSSL

SEQ ID NO: 26442 - protein, 10 aa, Homo sapiens
  AACR GENIE Results; RHEB_p.S16F; A0301
AILGYRFVGK

SEQ ID NO: 26443 - protein, 9 aa, Homo sapiens
  AACR GENIE Results; RHEB_p.S16F; C0702
YRFVGKSSL

SEQ ID NO: 26444 - protein, 9 aa, Homo sapiens
  AACR GENIE Results; RHEB_p.S16F; A0301
ILGYRFVGK

SEQ ID NO: 26445 - protein, 9 aa, Homo sapiens
  AACR GENIE Results; RHEB_p.S16F; B5701
KIAILGYRF

SEQ ID NO: 26446 - protein, 9 aa, Homo sapiens
  AACR GENIE Results; RHEB_p.S16F; C0701
YRFVGKSSL

SEQ ID NO: 26447 - protein, 9 aa, Homo sapiens
  AACR GENIE Results; RHEB_p.S16F; B0801
YRFVGKSSL

SEQ ID NO: 26448 - protein, 10 aa, Homo sapiens
  AACR GENIE Results; RHEB_p.S16F; A1101
AILGYRFVGK

SEQ ID NO: 26449 - protein, 8 aa, Homo sapiens
  AACR GENIE Results; RHEB_p.S16F; B0801
RFVGKSSL

SEQ ID NO: 26450 - protein, 8 aa, Homo sapiens
  AACR GENIE Results; RHEB_p.S16F; B5701
IAILGYRF

SEQ ID NO: 26451 - protein, 9 aa, Homo sapiens
  AACR GENIE Results; RHEB_p.S16F; B0702
YRFVGKSSL

SEQ ID NO: 26452 - protein, 8 aa, Homo sapiens
  AACR GENIE Results; RHEB_p.S16F; A0301
LGYRFVGK

SEQ ID NO: 26453 - protein, 9 aa, Homo sapiens
  AACR GENIE Results; RHEB_p.S16F; B5101
FVGKSSLTI

SEQ ID NO: 26454 - protein, 9 aa, Homo sapiens
  AACR GENIE Results; RICTOR_p.D706E; A6801
TVSSLEYSR

SEQ ID NO: 26455 - protein, 9 aa, Homo sapiens
  AACR GENIE Results; RICTOR_p.D706E; A3303
EYSRDGLAR

SEQ ID NO: 26456 - protein, 9 aa, Homo sapiens
  AACR GENIE Results; RICTOR_p.D706E; B1501
KLTVSSLEY

SEQ ID NO: 26457 - protein, 9 aa, Homo sapiens
  AACR GENIE Results; RICTOR_p.D706E; B2702
TVSSLEYSR

SEQ ID NO: 26458 - protein, 9 aa, Homo sapiens
  AACR GENIE Results; RICTOR_p.D706E; A3303
TVSSLEYSR

SEQ ID NO: 26459 - protein, 9 aa, Homo sapiens
  AACR GENIE Results; RICTOR_p.D706E; A2902
KLTVSSLEY

SEQ ID NO: 26460 - protein, 9 aa, Homo sapiens
  AACR GENIE Results; RICTOR_p.D706E; A3101
TVSSLEYSR

SEQ ID NO: 26461 - protein, 9 aa, Homo sapiens
  AACR GENIE Results; RICTOR_p.D706E; B5001
LEYSRDGLA

SEQ ID NO: 26462 - protein, 9 aa, Homo sapiens
  AACR GENIE Results; RICTOR_p.D706E; A0301
KLTVSSLEY

SEQ ID NO: 26463 - protein, 8 aa, Homo sapiens
  AACR GENIE Results; RICTOR_p.D706E; A0101
LTVSSLEY

SEQ ID NO: 26464 - protein, 9 aa, Homo sapiens
  AACR GENIE Results; RICTOR_p.D706E; A3301
EYSRDGLAR

SEQ ID NO: 26465 - protein, 8 aa, Homo sapiens
  AACR GENIE Results; RICTOR_p.D706E; B5801
LTVSSLEY

SEQ ID NO: 26466 - protein, 9 aa, Homo sapiens
  AACR GENIE Results; RICTOR_p.D706E; A6802
TVSSLEYSR

SEQ ID NO: 26467 - protein, 9 aa, Homo sapiens
  AACR GENIE Results; RICTOR_p.D706E; B5801
KLTVSSLEY

SEQ ID NO: 26468 - protein, 9 aa, Homo sapiens
  AACR GENIE Results; RICTOR_p.D706E; A1101
TVSSLEYSR

SEQ ID NO: 26469 - protein, 8 aa, Homo sapiens
  AACR GENIE Results; RICTOR_p.D706E; B4002
LEYSRDGL

SEQ ID NO: 26470 - protein, 8 aa, Homo sapiens
  AACR GENIE Results; RICTOR_p.D706E; B1501
LTVSSLEY

SEQ ID NO: 26471 - protein, 9 aa, Homo sapiens
  AACR GENIE Results; RICTOR_p.D706E; A3301
TVSSLEYSR

SEQ ID NO: 26472 - protein, 9 aa, Homo sapiens
  AACR GENIE Results; RICTOR_p.D706E; B2702
KLTVSSLEY

SEQ ID NO: 26473 - protein, 8 aa, Homo sapiens
  AACR GENIE Results; RICTOR_p.D706E; B3501
LTVSSLEY

SEQ ID NO: 26474 - protein, 9 aa, Homo sapiens
  AACR GENIE Results; RIT1_p.M90I; A2402
QYIRAGEGF

SEQ ID NO: 26475 - protein, 9 aa, Homo sapiens
  AACR GENIE Results; RIT1_p.M90I; C0602
IRAGEGFII

SEQ ID NO: 26476 - protein, 9 aa, Homo sapiens
  AACR GENIE Results; RNF43_p.P660Sfs*87; C0602
TRNPRPLLL

SEQ ID NO: 26477 - protein, 9 aa, Homo sapiens
  AACR GENIE Results; RNF43_p.P660Sfs*87; B0702
VPRGTPLDL

SEQ ID NO: 26478 - protein, 10 aa, Homo sapiens
  AACR GENIE Results; RNF43_p.P660Sfs*87; B3501
SPAPGTTSTW

SEQ ID NO: 26479 - protein, 10 aa, Homo sapiens
  AACR GENIE Results; RNF43_p.P660Sfs*87; B0702
SPAPGTTSTW

SEQ ID NO: 26480 - protein, 9 aa, Homo sapiens
  AACR GENIE Results; RNF43_p.P660Sfs*87; A3001
ATRNPRPLL

SEQ ID NO: 26481 - protein, 10 aa, Homo sapiens
  AACR GENIE Results; RNF43_p.P660Sfs*87; B3801
SPAPGTTSTW

SEQ ID NO: 26482 - protein, 8 aa, Homo sapiens
  AACR GENIE Results; ROS1_p.E1348D; A0101
NLDKPLIY

SEQ ID NO: 26483 - protein, 9 aa, Homo sapiens
  AACR GENIE Results; ROS1_p.E1348D; C0501
NLDKPLIYF

SEQ ID NO: 26484 - protein, 9 aa, Homo sapiens
  AACR GENIE Results; ROS1_p.E1348D; C0802
NLDKPLIYF

SEQ ID NO: 26485 - protein, 8 aa, Homo sapiens
  AACR GENIE Results; ROS1_p.V1254A; B3502
DADLEHKV

SEQ ID NO: 26486 - protein, 11 aa, Homo sapiens
  AACR GENIE Results; ROS1_p.V1254A; A6802
QVFDADLEHKV

SEQ ID NO: 26487 - protein, 8 aa, Homo sapiens
  AACR GENIE Results; ROS1_p.V1254A; B5101
DADLEHKV

SEQ ID NO: 26488 - protein, 10 aa, Homo sapiens
  AACR GENIE Results; ROS1_p.V1254A; A1101
QVFDADLEHK

SEQ ID NO: 26489 - protein, 11 aa, Homo sapiens
  AACR GENIE Results; ROS1_p.V1254A; A0205
QVFDADLEHKV

SEQ ID NO: 26490 - protein, 9 aa, Homo sapiens
  AACR GENIE Results; RPTOR_p.V1228M; B5101
DGHIMSVSV

SEQ ID NO: 26491 - protein, 9 aa, Homo sapiens
  AACR GENIE Results; RPTOR_p.V1228M; B0702
RPDGHIMSV

SEQ ID NO: 26492 - protein, 9 aa, Homo sapiens
  AACR GENIE Results; RPTOR_p.V1228M; B5501
RPDGHIMSV

SEQ ID NO: 26493 - protein, 8 aa, Homo sapiens
  AACR GENIE Results; RPTOR_p.V1228M; A1101
PDGHIMSV

SEQ ID NO: 26494 - protein, 9 aa, Homo sapiens
  AACR GENIE Results; RPTOR_p.V1228M; B3503
RPDGHIMSV

SEQ ID NO: 26495 - protein, 9 aa, Homo sapiens
  AACR GENIE Results; RPTOR_p.V1228M; B1402
DGHIMSVSV

SEQ ID NO: 26496 - protein, 9 aa, Homo sapiens
  AACR GENIE Results; RPTOR_p.V1228M; C0401
RPDGHIMSV

SEQ ID NO: 26497 - protein, 10 aa, Homo sapiens
  AACR GENIE Results; RPTOR_p.V1228M; C0602
KRPDGHIMSV

SEQ ID NO: 26498 - protein, 9 aa, Homo sapiens
  AACR GENIE Results; RPTOR_p.V1228M; B5101
RPDGHIMSV

SEQ ID NO: 26499 - protein, 8 aa, Homo sapiens
  AACR GENIE Results; RPTOR_p.V1228M; A0201
PDGHIMSV

SEQ ID NO: 26500 - protein, 10 aa, Homo sapiens
  AACR GENIE Results; RPTOR_p.V1228M; A6801
MSVSVNGDVR

SEQ ID NO: 26501 - protein, 9 aa, Homo sapiens
  AACR GENIE Results; RPTOR_p.V1228M; B0801
DGHIMSVSV

SEQ ID NO: 26502 - protein, 8 aa, Homo sapiens
  AACR GENIE Results; RPTOR_p.V1228M; B3901
GHIMSVSV

SEQ ID NO: 26503 - protein, 11 aa, Homo sapiens
  AACR GENIE Results; RUNX1_p.I339_G340dup; B3501
LPSGIISDPRM

SEQ ID NO: 26504 - protein, 9 aa, Homo sapiens
  AACR GENIE Results; RUNX1_p.I339_G340dup; B5101
FPALPSGII

SEQ ID NO: 26505 - protein, 8 aa, Homo sapiens
  AACR GENIE Results; RUNX1_p.I339_G340dup; B5101
FPALPSGI

SEQ ID NO: 26506 - protein, 10 aa, Homo sapiens
  AACR GENIE Results; RUNX1_p.I339_G340dup; B1501
RQFPALPSGI

SEQ ID NO: 26507 - protein, 9 aa, Homo sapiens
  AACR GENIE Results; RUNX1_p.I339_G340dup; B1501
IISDPRMHY

SEQ ID NO: 26508 - protein, 9 aa, Homo sapiens
  AACR GENIE Results; SDHB_p.N106S; C0304
MNISGGNTL

SEQ ID NO: 26509 - protein, 10 aa, Homo sapiens
  AACR GENIE Results; SDHB_p.N106S; B1501
AMNISGGNTL

SEQ ID NO: 26510 - protein, 9 aa, Homo sapiens
  AACR GENIE Results; SDHB_p.N106S; C0303
MNISGGNTL

SEQ ID NO: 26511 - protein, 10 aa, Homo sapiens
  AACR GENIE Results; SDHB_p.N106S; C0102
AMNISGGNTL

SEQ ID NO: 26512 - protein, 9 aa, Homo sapiens
  AACR GENIE Results; SDHB_p.N106S; B0702
MNISGGNTL

SEQ ID NO: 26513 - protein, 9 aa, Homo sapiens
  AACR GENIE Results; SDHC_p.L5F; A3101
ALFLRHVGR

SEQ ID NO: 26514 - protein, 10 aa, Homo sapiens
  AACR GENIE Results; SDHC_p.T33M; B5701
MAKEEMERFW

SEQ ID NO: 26515 - protein, 9 aa, Homo sapiens
  AACR GENIE Results; SDHC_p.T33M; A1101
AVPLGTMAK

SEQ ID NO: 26516 - protein, 10 aa, Homo sapiens
  AACR GENIE Results; SDHC_p.T33M; B2705
IRNAVPLGTM

SEQ ID NO: 26517 - protein, 11 aa, Homo sapiens
  AACR GENIE Results; SDHC_p.T33M; B3501
VPLGTMAKEEM

SEQ ID NO: 26518 - protein, 9 aa, Homo sapiens
  AACR GENIE Results; SDHC_p.T33M; A0301
AVPLGTMAK

SEQ ID NO: 26519 - protein, 10 aa, Homo sapiens
  AACR GENIE Results; SDHC_p.T33M; A6801
NAVPLGTMAK

SEQ ID NO: 26520 - protein, 9 aa, Homo sapiens
  AACR GENIE Results; SDHC_p.T33M; B0702
RNAVPLGTM

SEQ ID NO: 26521 - protein, 9 aa, Homo sapiens
  AACR GENIE Results; SDHC_p.T33M; A0301
RNAVPLGTM

SEQ ID NO: 26522 - protein, 11 aa, Homo sapiens
  AACR GENIE Results; SDHC_p.T33M; B5701
TMAKEEMERFW

SEQ ID NO: 26523 - protein, 8 aa, Homo sapiens
  AACR GENIE Results; SDHC_p.T33M; B5101
NAVPLGTM

SEQ ID NO: 26524 - protein, 8 aa, Homo sapiens
  AACR GENIE Results; SDHC_p.T33M; B3501
NAVPLGTM

SEQ ID NO: 26525 - protein, 8 aa, Homo sapiens
  AACR GENIE Results; SDHC_p.T33M; B0702
NAVPLGTM

SEQ ID NO: 26526 - protein, 9 aa, Homo sapiens
  AACR GENIE Results; SDHD_p.L120S; B1501
SQKAAKAGL

SEQ ID NO: 26527 - protein, 9 aa, Homo sapiens
  AACR GENIE Results; SDHD_p.L120S; A1101
YVHGDASQK

SEQ ID NO: 26528 - protein, 9 aa, Homo sapiens
  AACR GENIE Results; SDHD_p.L120S; A0301
YVHGDASQK

SEQ ID NO: 26529 - protein, 9 aa, Homo sapiens
  AACR GENIE Results; SETBP1_p.E244K; B0702
SPESGRKTA

SEQ ID NO: 26530 - protein, 8 aa, Homo sapiens
  AACR GENIE Results; SETD2_p.S557P; B0702
SPIPRNRL

SEQ ID NO: 26531 - protein, 9 aa, Homo sapiens
  AACR GENIE Results; SF3B1_p.G740E; B4403
REKGLAAFL

SEQ ID NO: 26532 - protein, 9 aa, Homo sapiens
  AACR GENIE Results; SF3B1_p.K666N; C0602
ARHTGINIV

SEQ ID NO: 26533 - protein, 9 aa, Homo sapiens
  AACR GENIE Results; SF3B1_p.K666N; B5101
TGINIVQQI

SEQ ID NO: 26534 - protein, 9 aa, Homo sapiens
  AACR GENIE Results; SF3B1_p.K666N; C0602
TGINIVQQI

SEQ ID NO: 26535 - protein, 9 aa, Homo sapiens
  AACR GENIE Results; SF3B1_p.K666N; C1203
TGINIVQQI

SEQ ID NO: 26536 - protein, 9 aa, Homo sapiens
  AACR GENIE Results; SF3B1_p.K700E; B4001
QEVRTISAL

SEQ ID NO: 26537 - protein, 9 aa, Homo sapiens
  AACR GENIE Results; SF3B1_p.K700E; B4002
QEVRTISAL

SEQ ID NO: 26538 - protein, 9 aa, Homo sapiens
  AACR GENIE Results; SF3B1_p.K700E; A0201
GLVDEQQEV

SEQ ID NO: 26539 - protein, 9 aa, Homo sapiens
  AACR GENIE Results; SF3B1_p.K700E; B4403
QEVRTISAL

SEQ ID NO: 26540 - protein, 9 aa, Homo sapiens
  AACR GENIE Results; SF3B1_p.K700E; B1302
GLVDEQQEV

SEQ ID NO: 26541 - protein, 9 aa, Homo sapiens
  AACR GENIE Results; SF3B1_p.K700E; A3001
QEVRTISAL

SEQ ID NO: 26542 - protein, 9 aa, Homo sapiens
  AACR GENIE Results; SF3B1_p.K700E; B4901
DEQQEVRTI

SEQ ID NO: 26543 - protein, 9 aa, Homo sapiens
  AACR GENIE Results; SF3B1_p.K700E; B1801
DEQQEVRTI

SEQ ID NO: 26544 - protein, 9 aa, Homo sapiens
  AACR GENIE Results; SF3B1_p.K700E; B4403
DEQQEVRTI

SEQ ID NO: 26545 - protein, 9 aa, Homo sapiens
  AACR GENIE Results; SF3B1_p.K700E; B4901
QEVRTISAL

SEQ ID NO: 26546 - protein, 9 aa, Homo sapiens
  AACR GENIE Results; SF3B1_p.K700E; B4402
DEQQEVRTI

SEQ ID NO: 26547 - protein, 8 aa, Homo sapiens
  AACR GENIE Results; SF3B1_p.K700E; C0802
LVDEQQEV

SEQ ID NO: 26548 - protein, 8 aa, Homo sapiens
  AACR GENIE Results; SF3B1_p.K700E; B0801
EVRTISAL

SEQ ID NO: 26549 - protein, 8 aa, Homo sapiens
  AACR GENIE Results; SF3B1_p.K700E; C0501
LVDEQQEV

SEQ ID NO: 26550 - protein, 8 aa, Homo sapiens
  AACR GENIE Results; SF3B1_p.K700E; B4002
QEVRTISA

SEQ ID NO: 26551 - protein, 8 aa, Homo sapiens
  AACR GENIE Results; SF3B1_p.K700E; A2601
EVRTISAL

SEQ ID NO: 26552 - protein, 9 aa, Homo sapiens
  AACR GENIE Results; SF3B1_p.K700E; B4402
QEVRTISAL

SEQ ID NO: 26553 - protein, 9 aa, Homo sapiens
  AACR GENIE Results; SF3B1_p.K700E; B4002
DEQQEVRTI

SEQ ID NO: 26554 - protein, 9 aa, Homo sapiens
  AACR GENIE Results; SF3B1_p.K700E; B0702
QEVRTISAL

SEQ ID NO: 26555 - protein, 10 aa, Homo sapiens
  AACR GENIE Results; SF3B1_p.K700E; B2702
GLVDEQQEVR

SEQ ID NO: 26556 - protein, 9 aa, Homo sapiens
  AACR GENIE Results; SF3B1_p.K700E; A6801
LVDEQQEVR

SEQ ID NO: 26557 - protein, 9 aa, Homo sapiens
  AACR GENIE Results; SF3B1_p.K700E; B1501
QEVRTISAL

SEQ ID NO: 26558 - protein, 9 aa, Homo sapiens
  AACR GENIE Results; SF3B1_p.K700E; B2702
LVDEQQEVR

SEQ ID NO: 26559 - protein, 9 aa, Homo sapiens
  AACR GENIE Results; SF3B1_p.K700E; B1801
QEVRTISAL

SEQ ID NO: 26560 - protein, 9 aa, Homo sapiens
  AACR GENIE Results; SF3B1_p.K700E; A2301
QEVRTISAL

SEQ ID NO: 26561 - protein, 11 aa, Homo sapiens
  AACR GENIE Results; SF3B1_p.K700E; B2702
HGLVDEQQEVR

SEQ ID NO: 26562 - protein, 9 aa, Homo sapiens
  AACR GENIE Results; SF3B1_p.K700E; B1402
QQEVRTISA

SEQ ID NO: 26563 - protein, 9 aa, Homo sapiens
  AACR GENIE Results; SF3B1_p.K700E; B3901
QQEVRTISA

SEQ ID NO: 26564 - protein, 9 aa, Homo sapiens
  AACR GENIE Results; SF3B1_p.K700E; A2301
DEQQEVRTI

SEQ ID NO: 26565 - protein, 8 aa, Homo sapiens
  AACR GENIE Results; SF3B1_p.K700E; A3303
EVRTISAL

SEQ ID NO: 26566 - protein, 8 aa, Homo sapiens
  AACR GENIE Results; SF3B1_p.K700E; B0702
EVRTISAL

SEQ ID NO: 26567 - protein, 9 aa, Homo sapiens
  AACR GENIE Results; SF3B1_p.K700E; B5101
DEQQEVRTI

SEQ ID NO: 26568 - protein, 9 aa, Homo sapiens
  AACR GENIE Results; SF3B1_p.K700E; B1402
QEVRTISAL

SEQ ID NO: 26569 - protein, 9 aa, Homo sapiens
  AACR GENIE Results; SF3B1_p.K700E; B1501
QQEVRTISA

SEQ ID NO: 26570 - protein, 9 aa, Homo sapiens
  AACR GENIE Results; SF3B1_p.K700E; B3501
LVDEQQEVR

SEQ ID NO: 26571 - protein, 9 aa, Homo sapiens
  AACR GENIE Results; SF3B1_p.K700E; B0801
QQEVRTISA

SEQ ID NO: 26572 - protein, 8 aa, Homo sapiens
  AACR GENIE Results; SF3B1_p.K700E; B1501
EVRTISAL

SEQ ID NO: 26573 - protein, 8 aa, Homo sapiens
  AACR GENIE Results; SF3B1_p.K700E; A3001
EVRTISAL

SEQ ID NO: 26574 - protein, 9 aa, Homo sapiens
  AACR GENIE Results; SF3B1_p.K700E; B3901
QEVRTISAL

SEQ ID NO: 26575 - protein, 8 aa, Homo sapiens
  AACR GENIE Results; SF3B1_p.K700E; B1302
EQQEVRTI

SEQ ID NO: 26576 - protein, 11 aa, Homo sapiens
  AACR GENIE Results; SF3B1_p.K700E; B1501
EQQEVRTISAL

SEQ ID NO: 26577 - protein, 11 aa, Homo sapiens
  AACR GENIE Results; SF3B1_p.K700E; B4002
QEVRTISALAI

SEQ ID NO: 26578 - protein, 8 aa, Homo sapiens
  AACR GENIE Results; SF3B1_p.K700E; A0201
LVDEQQEV

SEQ ID NO: 26579 - protein, 8 aa, Homo sapiens
  AACR GENIE Results; SF3B1_p.K700E; B4901
QEVRTISA

SEQ ID NO: 26580 - protein, 9 aa, Homo sapiens
  AACR GENIE Results; SF3B1_p.K700E; B1402
DEQQEVRTI

SEQ ID NO: 26581 - protein, 9 aa, Homo sapiens
  AACR GENIE Results; SF3B1_p.K700E; B1302
QQEVRTISA

SEQ ID NO: 26582 - protein, 10 aa, Homo sapiens
  AACR GENIE Results; SF3B1_p.K700E; B4002
VDEQQEVRTI

SEQ ID NO: 26583 - protein, 9 aa, Homo sapiens
  AACR GENIE Results; SF3B1_p.K700E; B3801
DEQQEVRTI

SEQ ID NO: 26584 - protein, 9 aa, Homo sapiens
  AACR GENIE Results; SF3B1_p.R196Q; A1101
ASQPPSKQK

SEQ ID NO: 26585 - protein, 10 aa, Homo sapiens
  AACR GENIE Results; SF3B1_p.R196Q; A1101
AASQPPSKQK

SEQ ID NO: 26586 - protein, 9 aa, Homo sapiens
  AACR GENIE Results; SF3B1_p.R196Q; A0301
ASQPPSKQK

SEQ ID NO: 26587 - protein, 10 aa, Homo sapiens
  AACR GENIE Results; SF3B1_p.R196Q; A0301
AASQPPSKQK

SEQ ID NO: 26588 - protein, 10 aa, Homo sapiens
  AACR GENIE Results; SF3B1_p.R196Q; A3101
ASQPPSKQKR

SEQ ID NO: 26589 - protein, 9 aa, Homo sapiens
  AACR GENIE Results; SF3B1_p.R196Q; A3001
ASQPPSKQK

SEQ ID NO: 26590 - protein, 11 aa, Homo sapiens
  AACR GENIE Results; SF3B1_p.R196Q; A1101
AAASQPPSKQK

SEQ ID NO: 26591 - protein, 8 aa, Homo sapiens
  AACR GENIE Results; SF3B1_p.R196Q; A1101
SQPPSKQK

SEQ ID NO: 26592 - protein, 9 aa, Homo sapiens
  AACR GENIE Results; SF3B1_p.R196Q; A3101
ASQPPSKQK

SEQ ID NO: 26593 - protein, 11 aa, Homo sapiens
  AACR GENIE Results; SF3B1_p.R196Q; A0301
AAASQPPSKQK

SEQ ID NO: 26594 - protein, 10 aa, Homo sapiens
  AACR GENIE Results; SF3B1_p.R196Q; A3001
AASQPPSKQK

SEQ ID NO: 26595 - protein, 9 aa, Homo sapiens
  AACR GENIE Results; SF3B1_p.R196Q; A3101
SQPPSKQKR

SEQ ID NO: 26596 - protein, 9 aa, Homo sapiens
  AACR GENIE Results; SF3B1_p.R196Q; B5701
ASQPPSKQK

SEQ ID NO: 26597 - protein, 10 aa, Homo sapiens
  AACR GENIE Results; SF3B1_p.R196Q; A6801
AASQPPSKQK

SEQ ID NO: 26598 - protein, 9 aa, Homo sapiens
  AACR GENIE Results; SF3B1_p.R549C; B4001
LEDQECHLL

SEQ ID NO: 26599 - protein, 9 aa, Homo sapiens
  AACR GENIE Results; SF3B1_p.R957Q; B1302
SQTAVVMKT

SEQ ID NO: 26600 - protein, 9 aa, Homo sapiens
  AACR GENIE Results; SF3B1_p.R957Q; A1101
ISQTAVVMK

SEQ ID NO: 26601 - protein, 11 aa, Homo sapiens
  AACR GENIE Results; SF3B1_p.R957Q; A6801
DLISQTAVVMK

SEQ ID NO: 26602 - protein, 9 aa, Homo sapiens
  AACR GENIE Results; SF3B1_p.R957Q; C0802
AADLISQTA

SEQ ID NO: 26603 - protein, 9 aa, Homo sapiens
  AACR GENIE Results; SF3B1_p.R957Q; A0301
ISQTAVVMK

SEQ ID NO: 26604 - protein, 9 aa, Homo sapiens
  AACR GENIE Results; SF3B1_p.R957Q; A0201
SQTAVVMKT

SEQ ID NO: 26605 - protein, 10 aa, Homo sapiens
  AACR GENIE Results; SF3B1_p.R957Q; C0802
AADLISQTAV

SEQ ID NO: 26606 - protein, 8 aa, Homo sapiens
  AACR GENIE Results; SF3B1_p.R957Q; A1101
SQTAVVMK

SEQ ID NO: 26607 - protein, 9 aa, Homo sapiens
  AACR GENIE Results; SF3B1_p.R957Q; A6801
ISQTAVVMK

SEQ ID NO: 26608 - protein, 10 aa, Homo sapiens
  AACR GENIE Results; SF3B1_p.R957Q; A0301
LISQTAVVMK

SEQ ID NO: 26609 - protein, 8 aa, Homo sapiens
  AACR GENIE Results; SF3B1_p.R957Q; B1501
ISQTAVVM

SEQ ID NO: 26610 - protein, 9 aa, Homo sapiens
  AACR GENIE Results; SF3B1_p.R957Q; B0801
DLISQTAVV

SEQ ID NO: 26611 - protein, 8 aa, Homo sapiens
  AACR GENIE Results; SF3B1_p.R957Q; B0801
DLISQTAV

SEQ ID NO: 26612 - protein, 9 aa, Homo sapiens
  AACR GENIE Results; SF3B1_p.R957Q; B5101
DLISQTAVV

SEQ ID NO: 26613 - protein, 10 aa, Homo sapiens
  AACR GENIE Results; SF3B1_p.R957Q; A6801
LISQTAVVMK

SEQ ID NO: 26614 - protein, 10 aa, Homo sapiens
  AACR GENIE Results; SF3B1_p.R957Q; B3501
DLISQTAVVM

SEQ ID NO: 26615 - protein, 10 aa, Homo sapiens
  AACR GENIE Results; SF3B1_p.R957Q; A6801
QAADLISQTA

SEQ ID NO: 26616 - protein, 9 aa, Homo sapiens
  AACR GENIE Results; SF3B1_p.R957Q; B3501
LISQTAVVM

SEQ ID NO: 26617 - protein, 9 aa, Homo sapiens
  AACR GENIE Results; SF3B1_p.R957Q; A2601
DLISQTAVV

SEQ ID NO: 26618 - protein, 10 aa, Homo sapiens
  AACR GENIE Results; SF3B1_p.R957Q; A1101
LISQTAVVMK

SEQ ID NO: 26619 - protein, 11 aa, Homo sapiens
  AACR GENIE Results; SF3B1_p.R957Q; A3101
RQQAADLISQT

SEQ ID NO: 26620 - protein, 10 aa, Homo sapiens
  AACR GENIE Results; SF3B1_p.R957Q; A6801
DLISQTAVVM

SEQ ID NO: 26621 - protein, 9 aa, Homo sapiens
  AACR GENIE Results; SF3B1_p.R957Q; C1203
QAADLISQT

SEQ ID NO: 26622 - protein, 9 aa, Homo sapiens
  AACR GENIE Results; SF3B1_p.R957Q; A3001
ADLISQTAV

SEQ ID NO: 26623 - protein, 8 aa, Homo sapiens
  AACR GENIE Results; SF3B1_p.R957Q; B1302
SQTAVVMK

SEQ ID NO: 26624 - protein, 8 aa, Homo sapiens
  AACR GENIE Results; SF3B1_p.R957Q; C1203
ISQTAVVM

SEQ ID NO: 26625 - protein, 9 aa, Homo sapiens
  AACR GENIE Results; SF3B1_p.R957Q; B1302
DLISQTAVV

SEQ ID NO: 26626 - protein, 9 aa, Homo sapiens
  AACR GENIE Results; SF3B1_p.R957Q; B2705
SQTAVVMKT

SEQ ID NO: 26627 - protein, 9 aa, Homo sapiens
  AACR GENIE Results; SF3B1_p.R957Q; A6801
DLISQTAVV

SEQ ID NO: 26628 - protein, 9 aa, Homo sapiens
  AACR GENIE Results; SF3B1_p.R957Q; B1501
LISQTAVVM

SEQ ID NO: 26629 - protein, 8 aa, Homo sapiens
  AACR GENIE Results; SF3B1_p.R957Q; C1601
ISQTAVVM

SEQ ID NO: 26630 - protein, 9 aa, Homo sapiens
  AACR GENIE Results; SF3B1_p.R957Q; A6801
QAADLISQT

SEQ ID NO: 26631 - protein, 9 aa, Homo sapiens
  AACR GENIE Results; SF3B1_p.R957Q; A3001
SQTAVVMKT

SEQ ID NO: 26632 - protein, 9 aa, Homo sapiens
  AACR GENIE Results; SF3B1_p.R957Q; A3101
SQTAVVMKT

SEQ ID NO: 26633 - protein, 10 aa, Homo sapiens
  AACR GENIE Results; SF3B1_p.R957Q; A2601
DLISQTAVVM

SEQ ID NO: 26634 - protein, 10 aa, Homo sapiens
  AACR GENIE Results; SF3B1_p.R957Q; C0501
AADLISQTAV

SEQ ID NO: 26635 - protein, 10 aa, Homo sapiens
  AACR GENIE Results; SF3B1_p.R957Q; C1203
QAADLISQTA

SEQ ID NO: 26636 - protein, 9 aa, Homo sapiens
  AACR GENIE Results; SF3B1_p.R957Q; A3101
ISQTAVVMK

SEQ ID NO: 26637 - protein, 9 aa, Homo sapiens
  AACR GENIE Results; SF3B1_p.R957Q; B1302
ADLISQTAV

SEQ ID NO: 26638 - protein, 9 aa, Homo sapiens
  AACR GENIE Results; SF3B1_p.R957Q; B3801
SQTAVVMKT

SEQ ID NO: 26639 - protein, 9 aa, Homo sapiens
  AACR GENIE Results; SF3B1_p.R957Q; A3001
QAADLISQT

SEQ ID NO: 26640 - protein, 9 aa, Homo sapiens
  AACR GENIE Results; SF3B1_p.R957Q; A0201
DLISQTAVV

SEQ ID NO: 26641 - protein, 11 aa, Homo sapiens
  AACR GENIE Results; SF3B1_p.R957Q; A0201
QAADLISQTAV

SEQ ID NO: 26642 - protein, 8 aa, Homo sapiens
  AACR GENIE Results; SF3B1_p.R957Q; B1302
DLISQTAV

SEQ ID NO: 26643 - protein, 8 aa, Homo sapiens
  AACR GENIE Results; SF3B1_p.R957Q; B2705
SQTAVVMK

SEQ ID NO: 26644 - protein, 8 aa, Homo sapiens
  AACR GENIE Results; SF3B1_p.R957Q; B5101
DLISQTAV

SEQ ID NO: 26645 - protein, 10 aa, Homo sapiens
  AACR GENIE Results; SF3B1_p.R957Q; A3001
QAADLISQTA

SEQ ID NO: 26646 - protein, 10 aa, Homo sapiens
  AACR GENIE Results; SF3B1_p.R957Q; A0201
AADLISQTAV

SEQ ID NO: 26647 - protein, 9 aa, Homo sapiens
  AACR GENIE Results; SF3B1_p.R957Q; B0702
LISQTAVVM

SEQ ID NO: 26648 - protein, 10 aa, Homo sapiens
  AACR GENIE Results; SMAD2_p.E403K; B1501
SVNQGFKAVY

SEQ ID NO: 26649 - protein, 8 aa, Homo sapiens
  AACR GENIE Results; SMAD2_p.E403K; B1501
NQGFKAVY

SEQ ID NO: 26650 - protein, 10 aa, Homo sapiens
  AACR GENIE Results; SMAD2_p.E403K; A3201
SVNQGFKAVY

SEQ ID NO: 26651 - protein, 10 aa, Homo sapiens
  AACR GENIE Results; SMAD2_p.E403K; A2601
SVNQGFKAVY

SEQ ID NO: 26652 - protein, 9 aa, Homo sapiens
  AACR GENIE Results; SMAD2_p.E403K; B1501
VNQGFKAVY

SEQ ID NO: 26653 - protein, 9 aa, Homo sapiens
  AACR GENIE Results; SMAD2_p.E403K; A1101
AQSVNQGFK

SEQ ID NO: 26654 - protein, 10 aa, Homo sapiens
  AACR GENIE Results; SMAD2_p.E403K; B3501
SVNQGFKAVY

SEQ ID NO: 26655 - protein, 10 aa, Homo sapiens
  AACR GENIE Results; SMAD2_p.E403K; A2902
SVNQGFKAVY

SEQ ID NO: 26656 - protein, 10 aa, Homo sapiens
  AACR GENIE Results; SMAD2_p.E403K; A3101
GFKAVYQLTR

SEQ ID NO: 26657 - protein, 11 aa, Homo sapiens
  AACR GENIE Results; SMAD2_p.E403K; B1501
QSVNQGFKAVY

SEQ ID NO: 26658 - protein, 9 aa, Homo sapiens
  AACR GENIE Results; SMAD2_p.E403K; A2902
VNQGFKAVY

SEQ ID NO: 26659 - protein, 9 aa, Homo sapiens
  AACR GENIE Results; SMAD2_p.E403K; C1502
SVNQGFKAV

SEQ ID NO: 26660 - protein, 10 aa, Homo sapiens
  AACR GENIE Results; SMAD2_p.E403K; A1101
LAQSVNQGFK

SEQ ID NO: 26661 - protein, 8 aa, Homo sapiens
  AACR GENIE Results; SMAD2_p.E403K; B0801
NQGFKAVY

SEQ ID NO: 26662 - protein, 9 aa, Homo sapiens
  AACR GENIE Results; SMAD2_p.E403K; B0702
SVNQGFKAV

SEQ ID NO: 26663 - protein, 9 aa, Homo sapiens
  AACR GENIE Results; SMAD2_p.E403K; A0301
AQSVNQGFK

SEQ ID NO: 26664 - protein, 10 aa, Homo sapiens
  AACR GENIE Results; SMAD2_p.E403K; B4403
SVNQGFKAVY

SEQ ID NO: 26665 - protein, 11 aa, Homo sapiens
  AACR GENIE Results; SMAD2_p.E403K; A0301
LLAQSVNQGFK

SEQ ID NO: 26666 - protein, 9 aa, Homo sapiens
  AACR GENIE Results; SMAD2_p.E403K; A2301
VNQGFKAVY

SEQ ID NO: 26667 - protein, 9 aa, Homo sapiens
  AACR GENIE Results; SMAD2_p.E403K; C1601
SVNQGFKAV

SEQ ID NO: 26668 - protein, 10 aa, Homo sapiens
  AACR GENIE Results; SMAD2_p.E403K; A6801
SVNQGFKAVY

SEQ ID NO: 26669 - protein, 11 aa, Homo sapiens
  AACR GENIE Results; SMAD2_p.E403K; A1101
LLAQSVNQGFK

SEQ ID NO: 26670 - protein, 9 aa, Homo sapiens
  AACR GENIE Results; SMAD2_p.E403K; C0202
KAVYQLTRM

SEQ ID NO: 26671 - protein, 9 aa, Homo sapiens
  AACR GENIE Results; SMAD2_p.E403K; A0201
SVNQGFKAV

SEQ ID NO: 26672 - protein, 11 aa, Homo sapiens
  AACR GENIE Results; SMAD2_p.E403K; B3501
QSVNQGFKAVY

SEQ ID NO: 26673 - protein, 10 aa, Homo sapiens
  AACR GENIE Results; SMAD2_p.E403K; A1101
SVNQGFKAVY

SEQ ID NO: 26674 - protein, 9 aa, Homo sapiens
  AACR GENIE Results; SMAD2_p.R321Q; A6801
QNATVEMTR

SEQ ID NO: 26675 - protein, 10 aa, Homo sapiens
  AACR GENIE Results; SMAD2_p.R321Q; B3501
NVNQNATVEM

SEQ ID NO: 26676 - protein, 9 aa, Homo sapiens
  AACR GENIE Results; SMAD2_p.R321Q; A0201
LLSNVNQNA

SEQ ID NO: 26677 - protein, 8 aa, Homo sapiens
  AACR GENIE Results; SMAD2_p.R321Q; B1501
NQNATVEM

SEQ ID NO: 26678 - protein, 11 aa, Homo sapiens
  AACR GENIE Results; SMAD2_p.R321Q; A0201
LLSNVNQNATV

SEQ ID NO: 26679 - protein, 10 aa, Homo sapiens
  AACR GENIE Results; SMAD2_p.R321Q; A6801
NQNATVEMTR

SEQ ID NO: 26680 - protein, 11 aa, Homo sapiens
  AACR GENIE Results; SMAD2_p.R321Q; A6801
VNQNATVEMTR

SEQ ID NO: 26681 - protein, 10 aa, Homo sapiens
  AACR GENIE Results; SMAD2_p.R321Q; A6801
QNATVEMTRR

SEQ ID NO: 26682 - protein, 10 aa, Homo sapiens
  AACR GENIE Results; SMAD2_p.R321Q; B1501
NVNQNATVEM

SEQ ID NO: 26683 - protein, 9 aa, Homo sapiens
  AACR GENIE Results; SMAD2_p.R321Q; B1501
VNQNATVEM

SEQ ID NO: 26684 - protein, 10 aa, Homo sapiens
  AACR GENIE Results; SMAD2_p.R321Q; B0702
NVNQNATVEM

SEQ ID NO: 26685 - protein, 9 aa, Homo sapiens
  AACR GENIE Results; SMAD2_p.R321Q; B1302
LLSNVNQNA

SEQ ID NO: 26686 - protein, 10 aa, Homo sapiens
  AACR GENIE Results; SMAD2_p.T303R; B3801
FRDPSNSERF

SEQ ID NO: 26687 - protein, 10 aa, Homo sapiens
  AACR GENIE Results; SMAD2_p.T303R; B2702
FRDPSNSERF

SEQ ID NO: 26688 - protein, 9 aa, Homo sapiens
  AACR GENIE Results; SMAD2_p.T303R; B2705
FRDPSNSER

SEQ ID NO: 26689 - protein, 10 aa, Homo sapiens
  AACR GENIE Results; SMAD2_p.T303R; A3101
GFRDPSNSER

SEQ ID NO: 26690 - protein, 10 aa, Homo sapiens
  AACR GENIE Results; SMAD2_p.T303R; C0501
FRDPSNSERF

SEQ ID NO: 26691 - protein, 10 aa, Homo sapiens
  AACR GENIE Results; SMAD2_p.T303R; C0401
FRDPSNSERF

SEQ ID NO: 26692 - protein, 10 aa, Homo sapiens
  AACR GENIE Results; SMAD2_p.T303R; B2705
FRDPSNSERF

SEQ ID NO: 26693 - protein, 9 aa, Homo sapiens
  AACR GENIE Results; SMAD3_p.R287W; B5701
RNAAVELTW

SEQ ID NO: 26694 - protein, 8 aa, Homo sapiens
  AACR GENIE Results; SMAD3_p.R287W; B5701
NAAVELTW

SEQ ID NO: 26695 - protein, 9 aa, Homo sapiens
  AACR GENIE Results; SMAD3_p.R373H; A1101
CTIHMSFVK

SEQ ID NO: 26696 - protein, 8 aa, Homo sapiens
  AACR GENIE Results; SMAD3_p.R373H; C1601
MCTIHMSF

SEQ ID NO: 26697 - protein, 9 aa, Homo sapiens
  AACR GENIE Results; SMAD4_p.A118V; C0401
VFDLKCDSV

SEQ ID NO: 26698 - protein, 10 aa, Homo sapiens
  AACR GENIE Results; SMAD4_p.A118V; A6802
YVFDLKCDSV

SEQ ID NO: 26699 - protein, 10 aa, Homo sapiens
  AACR GENIE Results; SMAD4_p.A118V; A0205
YVFDLKCDSV

SEQ ID NO: 26700 - protein, 9 aa, Homo sapiens
  AACR GENIE Results; SMAD4_p.A118V; C0802
VFDLKCDSV

SEQ ID NO: 26701 - protein, 9 aa, Homo sapiens
  AACR GENIE Results; SMAD4_p.A406V; A0201
CLSDHVVFV

SEQ ID NO: 26702 - protein, 9 aa, Homo sapiens
  AACR GENIE Results; SMAD4_p.A406V; B1801
DHVVFVQSY

SEQ ID NO: 26703 - protein, 8 aa, Homo sapiens
  AACR GENIE Results; SMAD4_p.A406V; B1501
HVVFVQSY

SEQ ID NO: 26704 - protein, 9 aa, Homo sapiens
  AACR GENIE Results; SMAD4_p.A406V; B1402
DHVVFVQSY

SEQ ID NO: 26705 - protein, 9 aa, Homo sapiens
  AACR GENIE Results; SMAD4_p.A406V; B3501
DHVVFVQSY

SEQ ID NO: 26706 - protein, 8 aa, Homo sapiens
  AACR GENIE Results; SMAD4_p.A406V; C0501
LSDHVVFV

SEQ ID NO: 26707 - protein, 10 aa, Homo sapiens
  AACR GENIE Results; SMAD4_p.A406V; A6802
HVVFVQSYYL

SEQ ID NO: 26708 - protein, 9 aa, Homo sapiens
  AACR GENIE Results; SMAD4_p.A406V; A6802
CLSDHVVFV

SEQ ID NO: 26709 - protein, 9 aa, Homo sapiens
  AACR GENIE Results; SMAD4_p.A406V; B3901
DHVVFVQSY

SEQ ID NO: 26710 - protein, 9 aa, Homo sapiens
  AACR GENIE Results; SMAD4_p.A406V; B1302
CLSDHVVFV

SEQ ID NO: 26711 - protein, 9 aa, Homo sapiens
  AACR GENIE Results; SMAD4_p.A406V; A2902
HVVFVQSYY

SEQ ID NO: 26712 - protein, 8 aa, Homo sapiens
  AACR GENIE Results; SMAD4_p.A406V; B3501
HVVFVQSY

SEQ ID NO: 26713 - protein, 8 aa, Homo sapiens
  AACR GENIE Results; SMAD4_p.A406V; B1801
HVVFVQSY

SEQ ID NO: 26714 - protein, 9 aa, Homo sapiens
  AACR GENIE Results; SMAD4_p.A406V; B3801
DHVVFVQSY

SEQ ID NO: 26715 - protein, 9 aa, Homo sapiens
  AACR GENIE Results; SMAD4_p.A406V; A2301
DHVVFVQSY

SEQ ID NO: 26716 - protein, 11 aa, Homo sapiens
  AACR GENIE Results; SMAD4_p.A406V; A0101
LSDHVVFVQSY

SEQ ID NO: 26717 - protein, 9 aa, Homo sapiens
  AACR GENIE Results; SMAD4_p.D351H; B3501
CPIVTVHGY

SEQ ID NO: 26718 - protein, 8 aa, Homo sapiens
  AACR GENIE Results; SMAD4_p.D351H; B1501
PIVTVHGY

SEQ ID NO: 26719 - protein, 9 aa, Homo sapiens
  AACR GENIE Results; SMAD4_p.D351N; B3501
CPIVTVNGY

SEQ ID NO: 26720 - protein, 9 aa, Homo sapiens
  AACR GENIE Results; SMAD4_p.D351V; B3501
CPIVTVVGY

SEQ ID NO: 26721 - protein, 9 aa, Homo sapiens
  AACR GENIE Results; SMAD4_p.D351V; C1203
SSCPIVTVV

SEQ ID NO: 26722 - protein, 9 aa, Homo sapiens
  AACR GENIE Results; SMAD4_p.D351Y; C1203
SSCPIVTVY

SEQ ID NO: 26723 - protein, 9 aa, Homo sapiens
  AACR GENIE Results; SMAD4_p.D351Y; B3501
SSCPIVTVY

SEQ ID NO: 26724 - protein, 9 aa, Homo sapiens
  AACR GENIE Results; SMAD4_p.D351Y; B1501
SSCPIVTVY

SEQ ID NO: 26725 - protein, 11 aa, Homo sapiens
  AACR GENIE Results; SMAD4_p.D351Y; B3501
VPSSCPIVTVY

SEQ ID NO: 26726 - protein, 9 aa, Homo sapiens
  AACR GENIE Results; SMAD4_p.D351Y; B3501
CPIVTVYGY

SEQ ID NO: 26727 - protein, 9 aa, Homo sapiens
  AACR GENIE Results; SMAD4_p.D351Y; A2902
SSCPIVTVY

SEQ ID NO: 26728 - protein, 9 aa, Homo sapiens
  AACR GENIE Results; SMAD4_p.D351Y; C1601
SSCPIVTVY

SEQ ID NO: 26729 - protein, 9 aa, Homo sapiens
  AACR GENIE Results; SMAD4_p.D351Y; C0202
SSCPIVTVY

SEQ ID NO: 26730 - protein, 9 aa, Homo sapiens
  AACR GENIE Results; SMAD4_p.D351Y; A2601
SSCPIVTVY

SEQ ID NO: 26731 - protein, 9 aa, Homo sapiens
  AACR GENIE Results; SMAD4_p.D351Y; A1101
SSCPIVTVY

SEQ ID NO: 26732 - protein, 9 aa, Homo sapiens
  AACR GENIE Results; SMAD4_p.D351Y; B5701
SSCPIVTVY

SEQ ID NO: 26733 - protein, 9 aa, Homo sapiens
  AACR GENIE Results; SMAD4_p.D351Y; A6801
SSCPIVTVY

SEQ ID NO: 26734 - protein, 10 aa, Homo sapiens
  AACR GENIE Results; SMAD4_p.D355G; B3801
YVGPSGGDRF

SEQ ID NO: 26735 - protein, 11 aa, Homo sapiens
  AACR GENIE Results; SMAD4_p.D355G; B3801
GYVGPSGGDRF

SEQ ID NO: 26736 - protein, 8 aa, Homo sapiens
  AACR GENIE Results; SMAD4_p.D355G; B5101
DGYVGPSG

SEQ ID NO: 26737 - protein, 11 aa, Homo sapiens
  AACR GENIE Results; SMAD4_p.D355G; A2301
GYVGPSGGDRF

SEQ ID NO: 26738 - protein, 10 aa, Homo sapiens
  AACR GENIE Results; SMAD4_p.D355G; B1501
YVGPSGGDRF

SEQ ID NO: 26739 - protein, 10 aa, Homo sapiens
  AACR GENIE Results; SMAD4_p.D355G; B3501
YVGPSGGDRF

SEQ ID NO: 26740 - protein, 10 aa, Homo sapiens
  AACR GENIE Results; SMAD4_p.D355G; A2601
YVGPSGGDRF

SEQ ID NO: 26741 - protein, 8 aa, Homo sapiens
  AACR GENIE Results; SMAD4_p.D355V; B5101
DGYVVPSG

SEQ ID NO: 26742 - protein, 10 aa, Homo sapiens
  AACR GENIE Results; SMAD4_p.D355V; B3801
YVVPSGGDRF

SEQ ID NO: 26743 - protein, 11 aa, Homo sapiens
  AACR GENIE Results; SMAD4_p.D355V; A2301
GYVVPSGGDRF

SEQ ID NO: 26744 - protein, 10 aa, Homo sapiens
  AACR GENIE Results; SMAD4_p.D355V; A2601
YVVPSGGDRF

SEQ ID NO: 26745 - protein, 11 aa, Homo sapiens
  AACR GENIE Results; SMAD4_p.D355V; B3801
GYVVPSGGDRF

SEQ ID NO: 26746 - protein, 10 aa, Homo sapiens
  AACR GENIE Results; SMAD4_p.D355V; B1501
YVVPSGGDRF

SEQ ID NO: 26747 - protein, 10 aa, Homo sapiens
  AACR GENIE Results; SMAD4_p.D355V; B3501
YVVPSGGDRF

SEQ ID NO: 26748 - protein, 11 aa, Homo sapiens
  AACR GENIE Results; SMAD4_p.D355V; B3901
GYVVPSGGDRF

SEQ ID NO: 26749 - protein, 9 aa, Homo sapiens
  AACR GENIE Results; SMAD4_p.D355V; B1501
VVPSGGDRF

SEQ ID NO: 26750 - protein, 10 aa, Homo sapiens
  AACR GENIE Results; SMAD4_p.D355V; B3901
YVVPSGGDRF

SEQ ID NO: 26751 - protein, 11 aa, Homo sapiens
  AACR GENIE Results; SMAD4_p.D355V; A2402
GYVVPSGGDRF

SEQ ID NO: 26752 - protein, 10 aa, Homo sapiens
  AACR GENIE Results; SMAD4_p.D360V; C0501
YVDPSGGVRF

SEQ ID NO: 26753 - protein, 10 aa, Homo sapiens
  AACR GENIE Results; SMAD4_p.D360V; A0101
YVDPSGGVRF

SEQ ID NO: 26754 - protein, 10 aa, Homo sapiens
  AACR GENIE Results; SMAD4_p.D360V; B3501
YVDPSGGVRF

SEQ ID NO: 26755 - protein, 10 aa, Homo sapiens
  AACR GENIE Results; SMAD4_p.D360V; B1501
YVDPSGGVRF

SEQ ID NO: 26756 - protein, 11 aa, Homo sapiens
  AACR GENIE Results; SMAD4_p.D360V; A2402
GYVDPSGGVRF

SEQ ID NO: 26757 - protein, 10 aa, Homo sapiens
  AACR GENIE Results; SMAD4_p.D360V; C0401
YVDPSGGVRF

SEQ ID NO: 26758 - protein, 11 aa, Homo sapiens
  AACR GENIE Results; SMAD4_p.D360V; A0201
YVDPSGGVRFC

SEQ ID NO: 26759 - protein, 10 aa, Homo sapiens
  AACR GENIE Results; SMAD4_p.D360V; C0304
YVDPSGGVRF

SEQ ID NO: 26760 - protein, 8 aa, Homo sapiens
  AACR GENIE Results; SMAD4_p.D360V; B3501
DPSGGVRF

SEQ ID NO: 26761 - protein, 10 aa, Homo sapiens
  AACR GENIE Results; SMAD4_p.D360V; A2601
YVDPSGGVRF

SEQ ID NO: 26762 - protein, 11 aa, Homo sapiens
  AACR GENIE Results; SMAD4_p.D360V; B1501
GYVDPSGGVRF

SEQ ID NO: 26763 - protein, 8 aa, Homo sapiens
  AACR GENIE Results; SMAD4_p.D360V; C0501
YVDPSGGV

SEQ ID NO: 26764 - protein, 10 aa, Homo sapiens
  AACR GENIE Results; SMAD4_p.D415Efs*20; A2301
YYLEKLGVHL

SEQ ID NO: 26765 - protein, 10 aa, Homo sapiens
  AACR GENIE Results; SMAD4_p.D415Efs*20; A2402
YYLEKLGVHL

SEQ ID NO: 26766 - protein, 9 aa, Homo sapiens
  AACR GENIE Results; SMAD4_p.D415Efs*20; A6802
FIRSTQVHI

SEQ ID NO: 26767 - protein, 9 aa, Homo sapiens
  AACR GENIE Results; SMAD4_p.D415Efs*20; B1302
FIRSTQVHI

SEQ ID NO: 26768 - protein, 10 aa, Homo sapiens
  AACR GENIE Results; SMAD4_p.D415Efs*20; C1402
YYLEKLGVHL

SEQ ID NO: 26769 - protein, 8 aa, Homo sapiens
  AACR GENIE Results; SMAD4_p.D415Efs*20; C0602
IRSTQVHI

SEQ ID NO: 26770 - protein, 8 aa, Homo sapiens
  AACR GENIE Results; SMAD4_p.D415Efs*20; B4002
LEKLGVHL

SEQ ID NO: 26771 - protein, 9 aa, Homo sapiens
  AACR GENIE Results; SMAD4_p.D415Efs*20; B0801
MLFIRSTQV

SEQ ID NO: 26772 - protein, 8 aa, Homo sapiens
  AACR GENIE Results; SMAD4_p.D415Efs*20; B3801
IRSTQVHI

SEQ ID NO: 26773 - protein, 9 aa, Homo sapiens
  AACR GENIE Results; SMAD4_p.D415Efs*20; A0201
MLFIRSTQV

SEQ ID NO: 26774 - protein, 9 aa, Homo sapiens
  AACR GENIE Results; SMAD4_p.D415Efs*20; B1302
MLFIRSTQV

SEQ ID NO: 26775 - protein, 9 aa, Homo sapiens
  AACR GENIE Results; SMAD4_p.D415Efs*20; C1502
FIRSTQVHI

SEQ ID NO: 26776 - protein, 9 aa, Homo sapiens
  AACR GENIE Results; SMAD4_p.D415Efs*20; A3001
FIRSTQVHI

SEQ ID NO: 26777 - protein, 9 aa, Homo sapiens
  AACR GENIE Results; SMAD4_p.D415Efs*20; B5701
FIRSTQVHI

SEQ ID NO: 26778 - protein, 9 aa, Homo sapiens
  AACR GENIE Results; SMAD4_p.D415Efs*20; C0202
FIRSTQVHI

SEQ ID NO: 26779 - protein, 11 aa, Homo sapiens
  AACR GENIE Results; SMAD4_p.D493H; A6801
AAAGIGVHDLR

SEQ ID NO: 26780 - protein, 9 aa, Homo sapiens
  AACR GENIE Results; SMAD4_p.D493H; B5701
AGIGVHDLR

SEQ ID NO: 26781 - protein, 9 aa, Homo sapiens
  AACR GENIE Results; SMAD4_p.D493H; A6801
AGIGVHDLR

SEQ ID NO: 26782 - protein, 8 aa, Homo sapiens
  AACR GENIE Results; SMAD4_p.D493H; B1501
AGIGVHDL

SEQ ID NO: 26783 - protein, 9 aa, Homo sapiens
  AACR GENIE Results; SMAD4_p.D493H; B3501
SAAAGIGVH

SEQ ID NO: 26784 - protein, 10 aa, Homo sapiens
  AACR GENIE Results; SMAD4_p.D493H; A6801
AAAGIGVHDL

SEQ ID NO: 26785 - protein, 11 aa, Homo sapiens
  AACR GENIE Results; SMAD4_p.D493N; A6801
AAAGIGVNDLR

SEQ ID NO: 26786 - protein, 11 aa, Homo sapiens
  AACR GENIE Results; SMAD4_p.D493N; B2702
AAAGIGVNDLR

SEQ ID NO: 26787 - protein, 10 aa, Homo sapiens
  AACR GENIE Results; SMAD4_p.D493N; B2702
AAGIGVNDLR

SEQ ID NO: 26788 - protein, 9 aa, Homo sapiens
  AACR GENIE Results; SMAD4_p.D493N; A6801
AGIGVNDLR

SEQ ID NO: 26789 - protein, 10 aa, Homo sapiens
  AACR GENIE Results; SMAD4_p.D493N; A1101
AAGIGVNDLR

SEQ ID NO: 26790 - protein, 10 aa, Homo sapiens
  AACR GENIE Results; SMAD4_p.D493N; A6801
AAGIGVNDLR

SEQ ID NO: 26791 - protein, 9 aa, Homo sapiens
  AACR GENIE Results; SMAD4_p.D493N; A3101
AGIGVNDLR

SEQ ID NO: 26792 - protein, 11 aa, Homo sapiens
  AACR GENIE Results; SMAD4_p.D493N; A3101
AAAGIGVNDLR

SEQ ID NO: 26793 - protein, 9 aa, Homo sapiens
  AACR GENIE Results; SMAD4_p.D493N; B5701
AGIGVNDLR

SEQ ID NO: 26794 - protein, 9 aa, Homo sapiens
  AACR GENIE Results; SMAD4_p.D537G; B4901
GEVLHTMPI

SEQ ID NO: 26795 - protein, 9 aa, Homo sapiens
  AACR GENIE Results; SMAD4_p.D537G; B4002
GEVLHTMPI

SEQ ID NO: 26796 - protein, 10 aa, Homo sapiens
  AACR GENIE Results; SMAD4_p.D537G; B5001
GEVLHTMPIA

SEQ ID NO: 26797 - protein, 10 aa, Homo sapiens
  AACR GENIE Results; SMAD4_p.D537G; A0205
GEVLHTMPIA

SEQ ID NO: 26798 - protein, 9 aa, Homo sapiens
  AACR GENIE Results; SMAD4_p.D537G; A0201
LLGEVLHTM

SEQ ID NO: 26799 - protein, 10 aa, Homo sapiens
  AACR GENIE Results; SMAD4_p.D537G; B4002
GEVLHTMPIA

SEQ ID NO: 26800 - protein, 9 aa, Homo sapiens
  AACR GENIE Results; SMAD4_p.D537G; B4001
GEVLHTMPI

SEQ ID NO: 26801 - protein, 9 aa, Homo sapiens
  AACR GENIE Results; SMAD4_p.D537G; B1501
ALQLLGEVL

SEQ ID NO: 26802 - protein, 9 aa, Homo sapiens
  AACR GENIE Results; SMAD4_p.D537G; A3001
GEVLHTMPI

SEQ ID NO: 26803 - protein, 10 aa, Homo sapiens
  AACR GENIE Results; SMAD4_p.D537G; A0201
QLLGEVLHTM

SEQ ID NO: 26804 - protein, 9 aa, Homo sapiens
  AACR GENIE Results; SMAD4_p.D537G; B3701
GEVLHTMPI

SEQ ID NO: 26805 - protein, 9 aa, Homo sapiens
  AACR GENIE Results; SMAD4_p.D537G; B1302
GEVLHTMPI

SEQ ID NO: 26806 - protein, 9 aa, Homo sapiens
  AACR GENIE Results; SMAD4_p.D537V; A0201
LLVEVLHTM

SEQ ID NO: 26807 - protein, 8 aa, Homo sapiens
  AACR GENIE Results; SMAD4_p.D537V; B1501
LQLLVEVL

SEQ ID NO: 26808 - protein, 9 aa, Homo sapiens
  AACR GENIE Results; SMAD4_p.D537V; B1501
ALQLLVEVL

SEQ ID NO: 26809 - protein, 9 aa, Homo sapiens
  AACR GENIE Results; SMAD4_p.D537V; A0201
ALQLLVEVL

SEQ ID NO: 26810 - protein, 11 aa, Homo sapiens
  AACR GENIE Results; SMAD4_p.E330K; B3801
FKMDVQVGETF

SEQ ID NO: 26811 - protein, 10 aa, Homo sapiens
  AACR GENIE Results; SMAD4_p.E330K; B1501
KMDVQVGETF

SEQ ID NO: 26812 - protein, 10 aa, Homo sapiens
  AACR GENIE Results; SMAD4_p.E330K; B3801
KMDVQVGETF

SEQ ID NO: 26813 - protein, 9 aa, Homo sapiens
  AACR GENIE Results; SMAD4_p.E330K; A2301
AYFKMDVQV

SEQ ID NO: 26814 - protein, 8 aa, Homo sapiens
  AACR GENIE Results; SMAD4_p.E330K; B5101
IAYFKMDV

SEQ ID NO: 26815 - protein, 9 aa, Homo sapiens
  AACR GENIE Results; SMAD4_p.G231Afs*10; A1101
SILGAAIVK

SEQ ID NO: 26816 - protein, 10 aa, Homo sapiens
  AACR GENIE Results; SMAD4_p.G231Afs*10; A1101
ASILGAAIVK

SEQ ID NO: 26817 - protein, 9 aa, Homo sapiens
  AACR GENIE Results; SMAD4_p.G231Afs*10; A0301
SILGAAIVK

SEQ ID NO: 26818 - protein, 9 aa, Homo sapiens
  AACR GENIE Results; SMAD4_p.G231Afs*10; B1302
SQPASILGA

SEQ ID NO: 26819 - protein, 10 aa, Homo sapiens
  AACR GENIE Results; SMAD4_p.G231Afs*10; B0702
QPASILGAAI

SEQ ID NO: 26820 - protein, 11 aa, Homo sapiens
  AACR GENIE Results; SMAD4_p.G231Afs*10; B1302
SQPASILGAAI

SEQ ID NO: 26821 - protein, 11 aa, Homo sapiens
  AACR GENIE Results; SMAD4_p.G231Afs*10; A1101
STSQPASILGA

SEQ ID NO: 26822 - protein, 9 aa, Homo sapiens
  AACR GENIE Results; SMAD4_p.G352E; B3501
CPIVTVDEY

SEQ ID NO: 26823 - protein, 11 aa, Homo sapiens
  AACR GENIE Results; SMAD4_p.G352E; B3901
EYVDPSGGDRF

SEQ ID NO: 26824 - protein, 11 aa, Homo sapiens
  AACR GENIE Results; SMAD4_p.G352E; B3801
EYVDPSGGDRF

SEQ ID NO: 26825 - protein, 10 aa, Homo sapiens
  AACR GENIE Results; SMAD4_p.G352E; A3303
EYVDPSGGDR

SEQ ID NO: 26826 - protein, 11 aa, Homo sapiens
  AACR GENIE Results; SMAD4_p.G352E; A3303
EYVDPSGGDRF

SEQ ID NO: 26827 - protein, 11 aa, Homo sapiens
  AACR GENIE Results; SMAD4_p.G352E; A2301
EYVDPSGGDRF

SEQ ID NO: 26828 - protein, 11 aa, Homo sapiens
  AACR GENIE Results; SMAD4_p.G352E; A2601
EYVDPSGGDRF

SEQ ID NO: 26829 - protein, 11 aa, Homo sapiens
  AACR GENIE Results; SMAD4_p.G352E; A2402
EYVDPSGGDRF

SEQ ID NO: 26830 - protein, 11 aa, Homo sapiens
  AACR GENIE Results; SMAD4_p.G352E; B3501
EYVDPSGGDRF

SEQ ID NO: 26831 - protein, 8 aa, Homo sapiens
  AACR GENIE Results; SMAD4_p.G352E; B3501
PIVTVDEY

SEQ ID NO: 26832 - protein, 8 aa, Homo sapiens
  AACR GENIE Results; SMAD4_p.G365D; A3303
DQLSNVHR

SEQ ID NO: 26833 - protein, 9 aa, Homo sapiens
  AACR GENIE Results; SMAD4_p.G386D; B3801
LHIGKDVQL

SEQ ID NO: 26834 - protein, 9 aa, Homo sapiens
  AACR GENIE Results; SMAD4_p.G386D; B3901
LHIGKDVQL

SEQ ID NO: 26835 - protein, 8 aa, Homo sapiens
  AACR GENIE Results; SMAD4_p.G386D; B3901
HIGKDVQL

SEQ ID NO: 26836 - protein, 8 aa, Homo sapiens
  AACR GENIE Results; SMAD4_p.G386D; B3502
HIGKDVQL

SEQ ID NO: 26837 - protein, 8 aa, Homo sapiens
  AACR GENIE Results; SMAD4_p.G386D; B3801
HIGKDVQL

SEQ ID NO: 26838 - protein, 8 aa, Homo sapiens
  AACR GENIE Results; SMAD4_p.G386D; B3503
HIGKDVQL

SEQ ID NO: 26839 - protein, 9 aa, Homo sapiens
  AACR GENIE Results; SMAD4_p.G386V; B3801
LHIGKVVQL

SEQ ID NO: 26840 - protein, 9 aa, Homo sapiens
  AACR GENIE Results; SMAD4_p.G386V; B2705
ARLHIGKVV

SEQ ID NO: 26841 - protein, 8 aa, Homo sapiens
  AACR GENIE Results; SMAD4_p.G386V; B0801
HIGKVVQL

SEQ ID NO: 26842 - protein, 9 aa, Homo sapiens
  AACR GENIE Results; SMAD4_p.G419R; A3303
YYLDREARR

SEQ ID NO: 26843 - protein, 9 aa, Homo sapiens
  AACR GENIE Results; SMAD4_p.G419R; A3303
SYYLDREAR

SEQ ID NO: 26844 - protein, 9 aa, Homo sapiens
  AACR GENIE Results; SMAD4_p.G419R; A3101
SYYLDREAR

SEQ ID NO: 26845 - protein, 10 aa, Homo sapiens
  AACR GENIE Results; SMAD4_p.G419R; B2705
RRAPGDAVHK

SEQ ID NO: 26846 - protein, 9 aa, Homo sapiens
  AACR GENIE Results; SMAD4_p.G419R; A3001
ARRAPGDAV

SEQ ID NO: 26847 - protein, 10 aa, Homo sapiens
  AACR GENIE Results; SMAD4_p.G419W; B5701
QSYYLDREAW

SEQ ID NO: 26848 - protein, 9 aa, Homo sapiens
  AACR GENIE Results; SMAD4_p.G419W; C1402
SYYLDREAW

SEQ ID NO: 26849 - protein, 8 aa, Homo sapiens
  AACR GENIE Results; SMAD4_p.G419W; C1402
YYLDREAW

SEQ ID NO: 26850 - protein, 10 aa, Homo sapiens
  AACR GENIE Results; SMAD4_p.G419W; A6802
EAWRAPGDAV

SEQ ID NO: 26851 - protein, 9 aa, Homo sapiens
  AACR GENIE Results; SMAD4_p.G419W; B5701
SYYLDREAW

SEQ ID NO: 26852 - protein, 9 aa, Homo sapiens
  AACR GENIE Results; SMAD4_p.G419W; B4403
SYYLDREAW

SEQ ID NO: 26853 - protein, 10 aa, Homo sapiens
  AACR GENIE Results; SMAD4_p.L389del; B4403
QECKGEGDVW

SEQ ID NO: 26854 - protein, 9 aa, Homo sapiens
  AACR GENIE Results; SMAD4_p.L43S; A1101
RAIESSVKK

SEQ ID NO: 26855 - protein, 8 aa, Homo sapiens
  AACR GENIE Results; SMAD4_p.L43S; B4403
IESSVKKL

SEQ ID NO: 26856 - protein, 9 aa, Homo sapiens
  AACR GENIE Results; SMAD4_p.L43S; A0301
RAIESSVKK

SEQ ID NO: 26857 - protein, 10 aa, Homo sapiens
  AACR GENIE Results; SMAD4_p.L43S; A0301
AIESSVKKLK

SEQ ID NO: 26858 - protein, 10 aa, Homo sapiens
  AACR GENIE Results; SMAD4_p.L43S; A1101
AIESSVKKLK

SEQ ID NO: 26859 - protein, 8 aa, Homo sapiens
  AACR GENIE Results; SMAD4_p.L43S; B1801
IESSVKKL

SEQ ID NO: 26860 - protein, 8 aa, Homo sapiens
  AACR GENIE Results; SMAD4_p.L43S; B4001
IESSVKKL

SEQ ID NO: 26861 - protein, 8 aa, Homo sapiens
  AACR GENIE Results; SMAD4_p.L43S; A2301
IESSVKKL

SEQ ID NO: 26862 - protein, 9 aa, Homo sapiens
  AACR GENIE Results; SMAD4_p.L43S; A6801
RAIESSVKK

SEQ ID NO: 26863 - protein, 9 aa, Homo sapiens
  AACR GENIE Results; SMAD4_p.L43S; A3001
RAIESSVKK

SEQ ID NO: 26864 - protein, 8 aa, Homo sapiens
  AACR GENIE Results; SMAD4_p.L43S; A0301
RAIESSVK

SEQ ID NO: 26865 - protein, 8 aa, Homo sapiens
  AACR GENIE Results; SMAD4_p.L43S; A1101
RAIESSVK

SEQ ID NO: 26866 - protein, 8 aa, Homo sapiens
  AACR GENIE Results; SMAD4_p.L43S; B4402
IESSVKKL

SEQ ID NO: 26867 - protein, 8 aa, Homo sapiens
  AACR GENIE Results; SMAD4_p.L43S; B0702
IESSVKKL

SEQ ID NO: 26868 - protein, 11 aa, Homo sapiens
  AACR GENIE Results; SMAD4_p.L495P; B2702
AAAGIGVDDPR

SEQ ID NO: 26869 - protein, 10 aa, Homo sapiens
  AACR GENIE Results; SMAD4_p.L495P; B2702
AAGIGVDDPR

SEQ ID NO: 26870 - protein, 11 aa, Homo sapiens
  AACR GENIE Results; SMAD4_p.L495P; A6801
AAAGIGVDDPR

SEQ ID NO: 26871 - protein, 8 aa, Homo sapiens
  AACR GENIE Results; SMAD4_p.L495P; C0501
GVDDPRRL

SEQ ID NO: 26872 - protein, 11 aa, Homo sapiens
  AACR GENIE Results; SMAD4_p.L495P; A6802
AAAGIGVDDPR

SEQ ID NO: 26873 - protein, 9 aa, Homo sapiens
  AACR GENIE Results; SMAD4_p.L495P; B2702
AGIGVDDPR

SEQ ID NO: 26874 - protein, 9 aa, Homo sapiens
  AACR GENIE Results; SMAD4_p.L495P; A6801
AGIGVDDPR

SEQ ID NO: 26875 - protein, 8 aa, Homo sapiens
  AACR GENIE Results; SMAD4_p.L495P; C0802
GVDDPRRL

SEQ ID NO: 26876 - protein, 10 aa, Homo sapiens
  AACR GENIE Results; SMAD4_p.L495P; A6801
AAGIGVDDPR

SEQ ID NO: 26877 - protein, 10 aa, Homo sapiens
  AACR GENIE Results; SMAD4_p.L529_H530delinsY; A2601
ETPCWIEIHY

SEQ ID NO: 26878 - protein, 9 aa, Homo sapiens
  AACR GENIE Results; SMAD4_p.L529_H530delinsY; B0801
EIHYRALQL

SEQ ID NO: 26879 - protein, 9 aa, Homo sapiens
  AACR GENIE Results; SMAD4_p.L529_H530delinsY; B3501
TPCWIEIHY

SEQ ID NO: 26880 - protein, 8 aa, Homo sapiens
  AACR GENIE Results; SMAD4_p.P356L; C0501
TVDGYVDL

SEQ ID NO: 26881 - protein, 10 aa, Homo sapiens
  AACR GENIE Results; SMAD4_p.P356L; C0501
YVDLSGGDRF

SEQ ID NO: 26882 - protein, 11 aa, Homo sapiens
  AACR GENIE Results; SMAD4_p.P356L; A2301
GYVDLSGGDRF

SEQ ID NO: 26883 - protein, 11 aa, Homo sapiens
  AACR GENIE Results; SMAD4_p.P356L; B3801
GYVDLSGGDRF

SEQ ID NO: 26884 - protein, 10 aa, Homo sapiens
  AACR GENIE Results; SMAD4_p.P356L; B3801
YVDLSGGDRF

SEQ ID NO: 26885 - protein, 10 aa, Homo sapiens
  AACR GENIE Results; SMAD4_p.P356L; C0802
YVDLSGGDRF

SEQ ID NO: 26886 - protein, 8 aa, Homo sapiens
  AACR GENIE Results; SMAD4_p.P356L; C0802
TVDGYVDL

SEQ ID NO: 26887 - protein, 11 aa, Homo sapiens
  AACR GENIE Results; SMAD4_p.P356L; B3901
GYVDLSGGDRF

SEQ ID NO: 26888 - protein, 11 aa, Homo sapiens
  AACR GENIE Results; SMAD4_p.P356L; A2402
GYVDLSGGDRF

SEQ ID NO: 26889 - protein, 10 aa, Homo sapiens
  AACR GENIE Results; SMAD4_p.P356S; B3801
YVDSSGGDRF

SEQ ID NO: 26890 - protein, 10 aa, Homo sapiens
  AACR GENIE Results; SMAD4_p.P356S; B3901
YVDSSGGDRF

SEQ ID NO: 26891 - protein, 10 aa, Homo sapiens
  AACR GENIE Results; SMAD4_p.P356S; C0501
YVDSSGGDRF

SEQ ID NO: 26892 - protein, 10 aa, Homo sapiens
  AACR GENIE Results; SMAD4_p.P356S; C0802
YVDSSGGDRF

SEQ ID NO: 26893 - protein, 11 aa, Homo sapiens
  AACR GENIE Results; SMAD4_p.P356S; B3901
GYVDSSGGDRF

SEQ ID NO: 26894 - protein, 11 aa, Homo sapiens
  AACR GENIE Results; SMAD4_p.P356S; B3801
GYVDSSGGDRF

SEQ ID NO: 26895 - protein, 10 aa, Homo sapiens
  AACR GENIE Results; SMAD4_p.P356S; A0101
YVDSSGGDRF

SEQ ID NO: 26896 - protein, 11 aa, Homo sapiens
  AACR GENIE Results; SMAD4_p.P356S; A2301
GYVDSSGGDRF

SEQ ID NO: 26897 - protein, 10 aa, Homo sapiens
  AACR GENIE Results; SMAD4_p.P356S; B3501
YVDSSGGDRF

SEQ ID NO: 26898 - protein, 9 aa, Homo sapiens
  AACR GENIE Results; SMAD4_p.P356S; B3801
VDSSGGDRF

SEQ ID NO: 26899 - protein, 10 aa, Homo sapiens
  AACR GENIE Results; SMAD4_p.P356S; B3503
YVDSSGGDRF

SEQ ID NO: 26900 - protein, 11 aa, Homo sapiens
  AACR GENIE Results; SMAD4_p.P356S; A2402
GYVDSSGGDRF

SEQ ID NO: 26901 - protein, 10 aa, Homo sapiens
  AACR GENIE Results; SMAD4_p.R361C; B3801
YVDPSGGDCF

SEQ ID NO: 26902 - protein, 10 aa, Homo sapiens
  AACR GENIE Results; SMAD4_p.R361C; B3502
YVDPSGGDCF

SEQ ID NO: 26903 - protein, 10 aa, Homo sapiens
  AACR GENIE Results; SMAD4_p.R361C; B3901
YVDPSGGDCF

SEQ ID NO: 26904 - protein, 10 aa, Homo sapiens
  AACR GENIE Results; SMAD4_p.R361C; A0206
YVDPSGGDCF

SEQ ID NO: 26905 - protein, 10 aa, Homo sapiens
  AACR GENIE Results; SMAD4_p.R361C; C0801
YVDPSGGDCF

SEQ ID NO: 26906 - protein, 10 aa, Homo sapiens
  AACR GENIE Results; SMAD4_p.R361C; B3503
YVDPSGGDCF

SEQ ID NO: 26907 - protein, 10 aa, Homo sapiens
  AACR GENIE Results; SMAD4_p.R361C; C0501
YVDPSGGDCF

SEQ ID NO: 26908 - protein, 10 aa, Homo sapiens
  AACR GENIE Results; SMAD4_p.R361C; C0802
YVDPSGGDCF

SEQ ID NO: 26909 - protein, 10 aa, Homo sapiens
  AACR GENIE Results; SMAD4_p.R361C; B5801
YVDPSGGDCF

SEQ ID NO: 26910 - protein, 10 aa, Homo sapiens
  AACR GENIE Results; SMAD4_p.R361C; B1502
YVDPSGGDCF

SEQ ID NO: 26911 - protein, 10 aa, Homo sapiens
  AACR GENIE Results; SMAD4_p.R361C; A0205
YVDPSGGDCF

SEQ ID NO: 26912 - protein, 11 aa, Homo sapiens
  AACR GENIE Results; SMAD4_p.R361C; B3901
GYVDPSGGDCF

SEQ ID NO: 26913 - protein, 10 aa, Homo sapiens
  AACR GENIE Results; SMAD4_p.R361C; B3501
YVDPSGGDCF

SEQ ID NO: 26914 - protein, 11 aa, Homo sapiens
  AACR GENIE Results; SMAD4_p.R361C; B3801
GYVDPSGGDCF

SEQ ID NO: 26915 - protein, 10 aa, Homo sapiens
  AACR GENIE Results; SMAD4_p.R361C; A0101
YVDPSGGDCF

SEQ ID NO: 26916 - protein, 11 aa, Homo sapiens
  AACR GENIE Results; SMAD4_p.R361C; A2301
GYVDPSGGDCF

SEQ ID NO: 26917 - protein, 10 aa, Homo sapiens
  AACR GENIE Results; SMAD4_p.R361C; B1501
YVDPSGGDCF

SEQ ID NO: 26918 - protein, 10 aa, Homo sapiens
  AACR GENIE Results; SMAD4_p.R361C; C0304
YVDPSGGDCF

SEQ ID NO: 26919 - protein, 10 aa, Homo sapiens
  AACR GENIE Results; SMAD4_p.R361C; C1701
YVDPSGGDCF

SEQ ID NO: 26920 - protein, 11 aa, Homo sapiens
  AACR GENIE Results; SMAD4_p.R361C; A2402
GYVDPSGGDCF

SEQ ID NO: 26921 - protein, 9 aa, Homo sapiens
  AACR GENIE Results; SMAD4_p.R361C; C0802
YVDPSGGDC

SEQ ID NO: 26922 - protein, 10 aa, Homo sapiens
  AACR GENIE Results; SMAD4_p.R361C; C0303
YVDPSGGDCF

SEQ ID NO: 26923 - protein, 10 aa, Homo sapiens
  AACR GENIE Results; SMAD4_p.R361G; B3801
YVDPSGGDGF

SEQ ID NO: 26924 - protein, 10 aa, Homo sapiens
  AACR GENIE Results; SMAD4_p.R361G; B3508
YVDPSGGDGF

SEQ ID NO: 26925 - protein, 10 aa, Homo sapiens
  AACR GENIE Results; SMAD4_p.R361G; B3901
YVDPSGGDGF

SEQ ID NO: 26926 - protein, 10 aa, Homo sapiens
  AACR GENIE Results; SMAD4_p.R361G; C0501
YVDPSGGDGF

SEQ ID NO: 26927 - protein, 11 aa, Homo sapiens
  AACR GENIE Results; SMAD4_p.R361G; B3901
GYVDPSGGDGF

SEQ ID NO: 26928 - protein, 10 aa, Homo sapiens
  AACR GENIE Results; SMAD4_p.R361G; B3502
YVDPSGGDGF

SEQ ID NO: 26929 - protein, 10 aa, Homo sapiens
  AACR GENIE Results; SMAD4_p.R361G; A0206
YVDPSGGDGF

SEQ ID NO: 26930 - protein, 10 aa, Homo sapiens
  AACR GENIE Results; SMAD4_p.R361G; C0802
YVDPSGGDGF

SEQ ID NO: 26931 - protein, 10 aa, Homo sapiens
  AACR GENIE Results; SMAD4_p.R361G; A0207
YVDPSGGDGF

SEQ ID NO: 26932 - protein, 10 aa, Homo sapiens
  AACR GENIE Results; SMAD4_p.R361G; C0801
YVDPSGGDGF

SEQ ID NO: 26933 - protein, 11 aa, Homo sapiens
  AACR GENIE Results; SMAD4_p.R361G; B3801
GYVDPSGGDGF

SEQ ID NO: 26934 - protein, 10 aa, Homo sapiens
  AACR GENIE Results; SMAD4_p.R361G; A0101
YVDPSGGDGF

SEQ ID NO: 26935 - protein, 10 aa, Homo sapiens
  AACR GENIE Results; SMAD4_p.R361G; B3503
YVDPSGGDGF

SEQ ID NO: 26936 - protein, 10 aa, Homo sapiens
  AACR GENIE Results; SMAD4_p.R361G; B3501
YVDPSGGDGF

SEQ ID NO: 26937 - protein, 10 aa, Homo sapiens
  AACR GENIE Results; SMAD4_p.R361G; B5801
YVDPSGGDGF

SEQ ID NO: 26938 - protein, 10 aa, Homo sapiens
  AACR GENIE Results; SMAD4_p.R361G; B1502
YVDPSGGDGF

SEQ ID NO: 26939 - protein, 11 aa, Homo sapiens
  AACR GENIE Results; SMAD4_p.R361G; A2301
GYVDPSGGDGF

SEQ ID NO: 26940 - protein, 10 aa, Homo sapiens
  AACR GENIE Results; SMAD4_p.R361G; B1501
YVDPSGGDGF

SEQ ID NO: 26941 - protein, 11 aa, Homo sapiens
  AACR GENIE Results; SMAD4_p.R361G; B2702
GYVDPSGGDGF

SEQ ID NO: 26942 - protein, 10 aa, Homo sapiens
  AACR GENIE Results; SMAD4_p.R361G; A0205
YVDPSGGDGF

SEQ ID NO: 26943 - protein, 11 aa, Homo sapiens
  AACR GENIE Results; SMAD4_p.R361G; B1503
GYVDPSGGDGF

SEQ ID NO: 26944 - protein, 11 aa, Homo sapiens
  AACR GENIE Results; SMAD4_p.R361G; A2402
GYVDPSGGDGF

SEQ ID NO: 26945 - protein, 9 aa, Homo sapiens
  AACR GENIE Results; SMAD4_p.R361G; B3801
VDPSGGDGF

SEQ ID NO: 26946 - protein, 10 aa, Homo sapiens
  AACR GENIE Results; SMAD4_p.R361H; B3801
YVDPSGGDHF

SEQ ID NO: 26947 - protein, 10 aa, Homo sapiens
  AACR GENIE Results; SMAD4_p.R361H; B3508
YVDPSGGDHF

SEQ ID NO: 26948 - protein, 10 aa, Homo sapiens
  AACR GENIE Results; SMAD4_p.R361H; C0501
YVDPSGGDHF

SEQ ID NO: 26949 - protein, 10 aa, Homo sapiens
  AACR GENIE Results; SMAD4_p.R361H; B3901
YVDPSGGDHF

SEQ ID NO: 26950 - protein, 10 aa, Homo sapiens
  AACR GENIE Results; SMAD4_p.R361H; C0802
YVDPSGGDHF

SEQ ID NO: 26951 - protein, 10 aa, Homo sapiens
  AACR GENIE Results; SMAD4_p.R361H; B3502
YVDPSGGDHF

SEQ ID NO: 26952 - protein, 10 aa, Homo sapiens
  AACR GENIE Results; SMAD4_p.R361H; A0207
YVDPSGGDHF

SEQ ID NO: 26953 - protein, 11 aa, Homo sapiens
  AACR GENIE Results; SMAD4_p.R361H; B3801
GYVDPSGGDHF

SEQ ID NO: 26954 - protein, 10 aa, Homo sapiens
  AACR GENIE Results; SMAD4_p.R361H; C0801
YVDPSGGDHF

SEQ ID NO: 26955 - protein, 11 aa, Homo sapiens
  AACR GENIE Results; SMAD4_p.R361H; B3901
GYVDPSGGDHF

SEQ ID NO: 26956 - protein, 11 aa, Homo sapiens
  AACR GENIE Results; SMAD4_p.R361H; A0201
YVDPSGGDHFC

SEQ ID NO: 26957 - protein, 11 aa, Homo sapiens
  AACR GENIE Results; SMAD4_p.R361H; A2301
GYVDPSGGDHF

SEQ ID NO: 26958 - protein, 10 aa, Homo sapiens
  AACR GENIE Results; SMAD4_p.R361H; B5801
YVDPSGGDHF

SEQ ID NO: 26959 - protein, 10 aa, Homo sapiens
  AACR GENIE Results; SMAD4_p.R361H; A0206
YVDPSGGDHF

SEQ ID NO: 26960 - protein, 10 aa, Homo sapiens
  AACR GENIE Results; SMAD4_p.R361H; B3503
YVDPSGGDHF

SEQ ID NO: 26961 - protein, 10 aa, Homo sapiens
  AACR GENIE Results; SMAD4_p.R361H; B3501
YVDPSGGDHF

SEQ ID NO: 26962 - protein, 10 aa, Homo sapiens
  AACR GENIE Results; SMAD4_p.R361H; A0101
YVDPSGGDHF

SEQ ID NO: 26963 - protein, 10 aa, Homo sapiens
  AACR GENIE Results; SMAD4_p.R361H; A0205
YVDPSGGDHF

SEQ ID NO: 26964 - protein, 10 aa, Homo sapiens
  AACR GENIE Results; SMAD4_p.R361H; B1502
YVDPSGGDHF

SEQ ID NO: 26965 - protein, 11 aa, Homo sapiens
  AACR GENIE Results; SMAD4_p.R361H; A2402
GYVDPSGGDHF

SEQ ID NO: 26966 - protein, 9 aa, Homo sapiens
  AACR GENIE Results; SMAD4_p.R361H; B3801
VDPSGGDHF

SEQ ID NO: 26967 - protein, 9 aa, Homo sapiens
  AACR GENIE Results; SMAD4_p.R361H; B3901
YVDPSGGDH

SEQ ID NO: 26968 - protein, 8 aa, Homo sapiens
  AACR GENIE Results; SMAD4_p.R361H; B3906
DHFCLGQL

SEQ ID NO: 26969 - protein, 11 aa, Homo sapiens
  AACR GENIE Results; SMAD4_p.R361H; A0206
YVDPSGGDHFC

SEQ ID NO: 26970 - protein, 10 aa, Homo sapiens
  AACR GENIE Results; SMAD4_p.R361H; B1501
YVDPSGGDHF

SEQ ID NO: 26971 - protein, 9 aa, Homo sapiens
  AACR GENIE Results; SMAD4_p.R361L; C0802
YVDPSGGDL

SEQ ID NO: 26972 - protein, 10 aa, Homo sapiens
  AACR GENIE Results; SMAD4_p.R361L; C0501
YVDPSGGDLF

SEQ ID NO: 26973 - protein, 9 aa, Homo sapiens
  AACR GENIE Results; SMAD4_p.R361L; C0501
YVDPSGGDL

SEQ ID NO: 26974 - protein, 11 aa, Homo sapiens
  AACR GENIE Results; SMAD4_p.R361L; A2402
GYVDPSGGDLF

SEQ ID NO: 26975 - protein, 10 aa, Homo sapiens
  AACR GENIE Results; SMAD4_p.R361L; C0802
YVDPSGGDLF

SEQ ID NO: 26976 - protein, 10 aa, Homo sapiens
  AACR GENIE Results; SMAD4_p.R361L; A0101
YVDPSGGDLF

SEQ ID NO: 26977 - protein, 10 aa, Homo sapiens
  AACR GENIE Results; SMAD4_p.R361L; B3501
YVDPSGGDLF

SEQ ID NO: 26978 - protein, 9 aa, Homo sapiens
  AACR GENIE Results; SMAD4_p.R361L; C0304
YVDPSGGDL

SEQ ID NO: 26979 - protein, 10 aa, Homo sapiens
  AACR GENIE Results; SMAD4_p.R361L; B1501
YVDPSGGDLF

SEQ ID NO: 26980 - protein, 9 aa, Homo sapiens
  AACR GENIE Results; SMAD4_p.R361L; C0303
YVDPSGGDL

SEQ ID NO: 26981 - protein, 10 aa, Homo sapiens
  AACR GENIE Results; SMAD4_p.R361S; B3801
YVDPSGGDSF

SEQ ID NO: 26982 - protein, 10 aa, Homo sapiens
  AACR GENIE Results; SMAD4_p.R361S; C0802
YVDPSGGDSF

SEQ ID NO: 26983 - protein, 10 aa, Homo sapiens
  AACR GENIE Results; SMAD4_p.R361S; C0501
YVDPSGGDSF

SEQ ID NO: 26984 - protein, 10 aa, Homo sapiens
  AACR GENIE Results; SMAD4_p.R361S; B3501
YVDPSGGDSF

SEQ ID NO: 26985 - protein, 11 aa, Homo sapiens
  AACR GENIE Results; SMAD4_p.R361S; A2301
GYVDPSGGDSF

SEQ ID NO: 26986 - protein, 11 aa, Homo sapiens
  AACR GENIE Results; SMAD4_p.R361S; B3801
GYVDPSGGDSF

SEQ ID NO: 26987 - protein, 11 aa, Homo sapiens
  AACR GENIE Results; SMAD4_p.R361S; A2402
GYVDPSGGDSF

SEQ ID NO: 26988 - protein, 10 aa, Homo sapiens
  AACR GENIE Results; SMAD4_p.R361S; A0101
YVDPSGGDSF

SEQ ID NO: 26989 - protein, 10 aa, Homo sapiens
  AACR GENIE Results; SMAD4_p.R361S; B1501
YVDPSGGDSF

SEQ ID NO: 26990 - protein, 10 aa, Homo sapiens
  AACR GENIE Results; SMAD4_p.R361S; C0304
YVDPSGGDSF

SEQ ID NO: 26991 - protein, 9 aa, Homo sapiens
  AACR GENIE Results; SMAD4_p.R361S; B3801
VDPSGGDSF

SEQ ID NO: 26992 - protein, 11 aa, Homo sapiens
  AACR GENIE Results; SMAD4_p.R361S; B1501
GYVDPSGGDSF

SEQ ID NO: 26993 - protein, 10 aa, Homo sapiens
  AACR GENIE Results; SMAD4_p.R361S; C0303
YVDPSGGDSF

SEQ ID NO: 26994 - protein, 10 aa, Homo sapiens
  AACR GENIE Results; SMAD4_p.R361S; C0401
YVDPSGGDSF

SEQ ID NO: 26995 - protein, 9 aa, Homo sapiens
  AACR GENIE Results; SMAD4_p.R496H; A2301
IGVDDLHRL

SEQ ID NO: 26996 - protein, 9 aa, Homo sapiens
  AACR GENIE Results; SMAD4_p.T521I; B5101
YPRQSIKEI

SEQ ID NO: 26997 - protein, 9 aa, Homo sapiens
  AACR GENIE Results; SMAD4_p.T521I; B5701
QSIKEIPCW

SEQ ID NO: 26998 - protein, 9 aa, Homo sapiens
  AACR GENIE Results; SMAD4_p.T521I; B0702
YPRQSIKEI

SEQ ID NO: 26999 - protein, 9 aa, Homo sapiens
  AACR GENIE Results; SMAD4_p.T521I; B5501
YPRQSIKEI

SEQ ID NO: 27000 - protein, 10 aa, Homo sapiens
  AACR GENIE Results; SMAD4_p.V354G; C0501
YGDPSGGDRF

SEQ ID NO: 27001 - protein, 10 aa, Homo sapiens
  AACR GENIE Results; SMAD4_p.V354G; B3501
YGDPSGGDRF

SEQ ID NO: 27002 - protein, 10 aa, Homo sapiens
  AACR GENIE Results; SMAD4_p.V354G; C0802
YGDPSGGDRF

SEQ ID NO: 27003 - protein, 9 aa, Homo sapiens
  AACR GENIE Results; SMAD4_p.V354G; B0702
GDPSGGDRF

SEQ ID NO: 27004 - protein, 10 aa, Homo sapiens
  AACR GENIE Results; SMAD4_p.Y353C; B3801
CVDPSGGDRF

SEQ ID NO: 27005 - protein, 11 aa, Homo sapiens
  AACR GENIE Results; SMAD4_p.Y353C; B3801
GCVDPSGGDRF

SEQ ID NO: 27006 - protein, 10 aa, Homo sapiens
  AACR GENIE Results; SMAD4_p.Y353C; C0501
CVDPSGGDRF

SEQ ID NO: 27007 - protein, 11 aa, Homo sapiens
  AACR GENIE Results; SMAD4_p.Y353C; B1501
GCVDPSGGDRF

SEQ ID NO: 27008 - protein, 9 aa, Homo sapiens
  AACR GENIE Results; SMARCA4_p.D1127H; A0301
YLRLHGTTK

SEQ ID NO: 27009 - protein, 10 aa, Homo sapiens
  AACR GENIE Results; SMARCA4_p.D1188Y; B3501
NPHQDLQAQY

SEQ ID NO: 27010 - protein, 8 aa, Homo sapiens
  AACR GENIE Results; SMARCA4_p.D1188Y; B1501
HQDLQAQY

SEQ ID NO: 27011 - protein, 9 aa, Homo sapiens
  AACR GENIE Results; SMARCA4_p.E1083K; A0301
KLLDRILPK

SEQ ID NO: 27012 - protein, 9 aa, Homo sapiens
  AACR GENIE Results; SMARCA4_p.E1083K; C0602
YRASGKFKL

SEQ ID NO: 27013 - protein, 10 aa, Homo sapiens
  AACR GENIE Results; SMARCA4_p.E1083K; A0301
KLLDRILPKL

SEQ ID NO: 27014 - protein, 10 aa, Homo sapiens
  AACR GENIE Results; SMARCA4_p.E1083K; A0201
KLLDRILPKL

SEQ ID NO: 27015 - protein, 9 aa, Homo sapiens
  AACR GENIE Results; SMARCA4_p.E821K; A1101
STLSNWAYK

SEQ ID NO: 27016 - protein, 9 aa, Homo sapiens
  AACR GENIE Results; SMARCA4_p.E821K; A0301
STLSNWAYK

SEQ ID NO: 27017 - protein, 9 aa, Homo sapiens
  AACR GENIE Results; SMARCA4_p.E821K; A2402
TLSNWAYKF

SEQ ID NO: 27018 - protein, 9 aa, Homo sapiens
  AACR GENIE Results; SMARCA4_p.E882K; A0301
IVDKGHRMK

SEQ ID NO: 27019 - protein, 8 aa, Homo sapiens
  AACR GENIE Results; SMARCA4_p.E882K; C0501
IVDKGHRM

SEQ ID NO: 27020 - protein, 8 aa, Homo sapiens
  AACR GENIE Results; SMARCA4_p.E882K; C0802
IVDKGHRM

SEQ ID NO: 27021 - protein, 9 aa, Homo sapiens
  AACR GENIE Results; SMARCA4_p.E882K; A1101
IVDKGHRMK

SEQ ID NO: 27022 - protein, 9 aa, Homo sapiens
  AACR GENIE Results; SMARCA4_p.E882K; C0304
MIVDKGHRM

SEQ ID NO: 27023 - protein, 9 aa, Homo sapiens
  AACR GENIE Results; SMARCA4_p.G1159W; A3101
RAWGLGLNL

SEQ ID NO: 27024 - protein, 9 aa, Homo sapiens
  AACR GENIE Results; SMARCA4_p.G1160V; B0702
STRAGVLGL

SEQ ID NO: 27025 - protein, 9 aa, Homo sapiens
  AACR GENIE Results; SMARCA4_p.G1160V; B1501
STRAGVLGL

SEQ ID NO: 27026 - protein, 9 aa, Homo sapiens
  AACR GENIE Results; SMARCA4_p.G1160V; A0201
VLGLNLQSA

SEQ ID NO: 27027 - protein, 9 aa, Homo sapiens
  AACR GENIE Results; SMARCA4_p.G1162C; A3001
STRAGGLCL

SEQ ID NO: 27028 - protein, 9 aa, Homo sapiens
  AACR GENIE Results; SMARCA4_p.G1162C; B0702
STRAGGLCL

SEQ ID NO: 27029 - protein, 9 aa, Homo sapiens
  AACR GENIE Results; SMARCA4_p.I1214F; B1501
TVNSVEEKF

SEQ ID NO: 27030 - protein, 9 aa, Homo sapiens
  AACR GENIE Results; SMARCA4_p.I1214F; B3501
TVNSVEEKF

SEQ ID NO: 27031 - protein, 10 aa, Homo sapiens
  AACR GENIE Results; SMARCA4_p.I1214F; B4403
EEKFLAAAKY

SEQ ID NO: 27032 - protein, 8 aa, Homo sapiens
  AACR GENIE Results; SMARCA4_p.I1214F; B1801
VEEKFLAA

SEQ ID NO: 27033 - protein, 10 aa, Homo sapiens
  AACR GENIE Results; SMARCA4_p.I1214F; B4402
EEKFLAAAKY

SEQ ID NO: 27034 - protein, 9 aa, Homo sapiens
  AACR GENIE Results; SMARCA4_p.I1214F; B1801
VEEKFLAAA

SEQ ID NO: 27035 - protein, 11 aa, Homo sapiens
  AACR GENIE Results; SMARCA4_p.I1214F; A1101
SVEEKFLAAAK

SEQ ID NO: 27036 - protein, 9 aa, Homo sapiens
  AACR GENIE Results; SMARCA4_p.I1214F; A2601
TVNSVEEKF

SEQ ID NO: 27037 - protein, 9 aa, Homo sapiens
  AACR GENIE Results; SMARCA4_p.I1214F; A0201
FLAAAKYKL

SEQ ID NO: 27038 - protein, 9 aa, Homo sapiens
  AACR GENIE Results; SMARCA4_p.P913L; A0201
LLQNKLPEL

SEQ ID NO: 27039 - protein, 9 aa, Homo sapiens
  AACR GENIE Results; SMARCA4_p.P913L; A1101
LTGTLLQNK

SEQ ID NO: 27040 - protein, 10 aa, Homo sapiens
  AACR GENIE Results; SMARCA4_p.P913L; A0201
TLLQNKLPEL

SEQ ID NO: 27041 - protein, 11 aa, Homo sapiens
  AACR GENIE Results; SMARCA4_p.P913L; B0702
APRRLLLTGTL

SEQ ID NO: 27042 - protein, 10 aa, Homo sapiens
  AACR GENIE Results; SMARCA4_p.P913L; A0301
LLTGTLLQNK

SEQ ID NO: 27043 - protein, 8 aa, Homo sapiens
  AACR GENIE Results; SMARCA4_p.R973W; A0301
VLWPFLLR

SEQ ID NO: 27044 - protein, 10 aa, Homo sapiens
  AACR GENIE Results; SMARCA4_p.T910M; A0301
LLMGTPLQNK

SEQ ID NO: 27045 - protein, 9 aa, Homo sapiens
  AACR GENIE Results; SMARCA4_p.T910M; A0301
LMGTPLQNK

SEQ ID NO: 27046 - protein, 9 aa, Homo sapiens
  AACR GENIE Results; SMARCA4_p.T910M; A1101
LMGTPLQNK

SEQ ID NO: 27047 - protein, 10 aa, Homo sapiens
  AACR GENIE Results; SMARCA4_p.T910M; A1101
LLMGTPLQNK

SEQ ID NO: 27048 - protein, 10 aa, Homo sapiens
  AACR GENIE Results; SMARCA4_p.T910M; B2702
LLMGTPLQNK

SEQ ID NO: 27049 - protein, 10 aa, Homo sapiens
  AACR GENIE Results; SMARCA4_p.T910M; A6802
LLMGTPLQNK

SEQ ID NO: 27050 - protein, 9 aa, Homo sapiens
  AACR GENIE Results; SMARCA4_p.T910M; B3503
MGTPLQNKL

SEQ ID NO: 27051 - protein, 9 aa, Homo sapiens
  AACR GENIE Results; SMARCB1_p.R377H; B5701
HLANTAPAW

SEQ ID NO: 27052 - protein, 9 aa, Homo sapiens
  AACR GENIE Results; SMARCB1_p.R377H; B3501
HLANTAPAW

SEQ ID NO: 27053 - protein, 9 aa, Homo sapiens
  AACR GENIE Results; SMARCB1_p.R377H; A3201
HLANTAPAW

SEQ ID NO: 27054 - protein, 10 aa, Homo sapiens
  AACR GENIE Results; SMARCB1_p.R377H; B5701
RHLANTAPAW

SEQ ID NO: 27055 - protein, 9 aa, Homo sapiens
  AACR GENIE Results; SMARCB1_p.R377H; B4403
HLANTAPAW

SEQ ID NO: 27056 - protein, 9 aa, Homo sapiens
  AACR GENIE Results; SMARCB1_p.R377H; A0301
HLANTAPAW

SEQ ID NO: 27057 - protein, 9 aa, Homo sapiens
  AACR GENIE Results; SMARCB1_p.R377H; B1501
HLANTAPAW

SEQ ID NO: 27058 - protein, 9 aa, Homo sapiens
  AACR GENIE Results; SMARCB1_p.R377H; A2601
HLANTAPAW

SEQ ID NO: 27059 - protein, 9 aa, Homo sapiens
  AACR GENIE Results; SMARCB1_p.R40Q; A0301
RMFQGSLYK

SEQ ID NO: 27060 - protein, 9 aa, Homo sapiens
  AACR GENIE Results; SMARCB1_p.R40Q; A1101
RMFQGSLYK

SEQ ID NO: 27061 - protein, 8 aa, Homo sapiens
  AACR GENIE Results; SMARCB1_p.R40Q; B1501
RMFQGSLY

SEQ ID NO: 27062 - protein, 8 aa, Homo sapiens
  AACR GENIE Results; SMARCB1_p.R40Q; A0301
RMFQGSLY

SEQ ID NO: 27063 - protein, 8 aa, Homo sapiens
  AACR GENIE Results; SMO_p.E194K; B1302
GQCKVPLV

SEQ ID NO: 27064 - protein, 8 aa, Homo sapiens
  AACR GENIE Results; SOX9_p.A118T; A6801
MVWAQTAR

SEQ ID NO: 27065 - protein, 8 aa, Homo sapiens
  AACR GENIE Results; SOX9_p.E293Rfs*3; A2601
ETFDVNRV

SEQ ID NO: 27066 - protein, 9 aa, Homo sapiens
  AACR GENIE Results; SOX9_p.E293Rfs*3; B4001
IETFDVNRV

SEQ ID NO: 27067 - protein, 8 aa, Homo sapiens
  AACR GENIE Results; SOX9_p.E293Rfs*3; B5101
ETFDVNRV

SEQ ID NO: 27068 - protein, 8 aa, Homo sapiens
  AACR GENIE Results; SOX9_p.E293Rfs*3; A6801
ETFDVNRV

SEQ ID NO: 27069 - protein, 9 aa, Homo sapiens
  AACR GENIE Results; SOX9_p.E293Rfs*3; B4403
IETFDVNRV

SEQ ID NO: 27070 - protein, 9 aa, Homo sapiens
  AACR GENIE Results; SOX9_p.E293Rfs*3; B1302
IETFDVNRV

SEQ ID NO: 27071 - protein, 10 aa, Homo sapiens
  AACR GENIE Results; SOX9_p.E293Rfs*3; A6801
SNIETFDVNR

SEQ ID NO: 27072 - protein, 9 aa, Homo sapiens
  AACR GENIE Results; SOX9_p.E293Rfs*3; A0201
IETFDVNRV

SEQ ID NO: 27073 - protein, 9 aa, Homo sapiens
  AACR GENIE Results; SOX9_p.E293Rfs*3; A6801
NIETFDVNR

SEQ ID NO: 27074 - protein, 10 aa, Homo sapiens
  AACR GENIE Results; SOX9_p.E293Rfs*3; A6801
NIETFDVNRV

SEQ ID NO: 27075 - protein, 9 aa, Homo sapiens
  AACR GENIE Results; SOX9_p.E293Rfs*3; A2301
IETFDVNRV

SEQ ID NO: 27076 - protein, 8 aa, Homo sapiens
  AACR GENIE Results; SOX9_p.E293Rfs*3; B1302
ETFDVNRV

SEQ ID NO: 27077 - protein, 8 aa, Homo sapiens
  AACR GENIE Results; SOX9_p.E293Rfs*3; B1801
ETFDVNRV

SEQ ID NO: 27078 - protein, 9 aa, Homo sapiens
  AACR GENIE Results; SOX9_p.E293Rfs*3; B3801
IETFDVNRV

SEQ ID NO: 27079 - protein, 8 aa, Homo sapiens
  AACR GENIE Results; SOX9_p.E293Rfs*3; C1203
ETFDVNRV

SEQ ID NO: 27080 - protein, 9 aa, Homo sapiens
  AACR GENIE Results; SOX9_p.E293Rfs*3; B1801
IETFDVNRV

SEQ ID NO: 27081 - protein, 11 aa, Homo sapiens
  AACR GENIE Results; SOX9_p.H380Rfs*4; A6801
PAAPPQQPQAR

SEQ ID NO: 27082 - protein, 10 aa, Homo sapiens
  AACR GENIE Results; SOX9_p.H380Rfs*4; A3303
AAPPQQPQAR

SEQ ID NO: 27083 - protein, 10 aa, Homo sapiens
  AACR GENIE Results; SOX9_p.H380Rfs*4; A6801
AAPPQQPQAR

SEQ ID NO: 27084 - protein, 9 aa, Homo sapiens
  AACR GENIE Results; SOX9_p.H380Rfs*4; A3303
APPQQPQAR

SEQ ID NO: 27085 - protein, 11 aa, Homo sapiens
  AACR GENIE Results; SOX9_p.H380Rfs*4; A3303
PAAPPQQPQAR

SEQ ID NO: 27086 - protein, 9 aa, Homo sapiens
  AACR GENIE Results; SOX9_p.P374Rfs*9; B0702
QPAAPRSSH

SEQ ID NO: 27087 - protein, 9 aa, Homo sapiens
  AACR GENIE Results; SOX9_p.P374Rfs*9; A6801
PPQQPAAPR

SEQ ID NO: 27088 - protein, 10 aa, Homo sapiens
  AACR GENIE Results; SOX9_p.P374Rfs*9; A6801
APPQQPAAPR

SEQ ID NO: 27089 - protein, 11 aa, Homo sapiens
  AACR GENIE Results; SOX9_p.P374Rfs*9; A6801
AAPPQQPAAPR

SEQ ID NO: 27090 - protein, 10 aa, Homo sapiens
  AACR GENIE Results; SOX9_p.Q246Cfs*8; A6801
TTPKTDVCSR

SEQ ID NO: 27091 - protein, 9 aa, Homo sapiens
  AACR GENIE Results; SOX9_p.R264T; A1101
GTQPPIDFR

SEQ ID NO: 27092 - protein, 10 aa, Homo sapiens
  AACR GENIE Results; SOX9_p.R264T; B0702
RPLPEGGTQP

SEQ ID NO: 27093 - protein, 10 aa, Homo sapiens
  AACR GENIE Results; SOX9_p.R271Afs*8; B5701
RQPPIDFATW

SEQ ID NO: 27094 - protein, 10 aa, Homo sapiens
  AACR GENIE Results; SOX9_p.R271Afs*8; A2402
RQPPIDFATW

SEQ ID NO: 27095 - protein, 10 aa, Homo sapiens
  AACR GENIE Results; SOX9_p.R271Afs*8; A2301
RQPPIDFATW

SEQ ID NO: 27096 - protein, 9 aa, Homo sapiens
  AACR GENIE Results; SRC_p.R509Q; B4001
KEPEEQPTF

SEQ ID NO: 27097 - protein, 9 aa, Homo sapiens
  AACR GENIE Results; SRC_p.R509Q; B4403
KEPEEQPTF

SEQ ID NO: 27098 - protein, 9 aa, Homo sapiens
  AACR GENIE Results; SRC_p.R509Q; B4402
KEPEEQPTF

SEQ ID NO: 27099 - protein, 9 aa, Homo sapiens
  AACR GENIE Results; SRC_p.R509Q; B1501
KEPEEQPTF

SEQ ID NO: 27100 - protein, 8 aa, Homo sapiens
  AACR GENIE Results; SRC_p.R509Q; B1801
EEQPTFEY

SEQ ID NO: 27101 - protein, 9 aa, Homo sapiens
  AACR GENIE Results; SRC_p.R509Q; A2301
KEPEEQPTF

SEQ ID NO: 27102 - protein, 9 aa, Homo sapiens
  AACR GENIE Results; SRC_p.R509Q; B4403
EEQPTFEYL

SEQ ID NO: 27103 - protein, 9 aa, Homo sapiens
  AACR GENIE Results; SRC_p.R509Q; B4001
EEQPTFEYL

SEQ ID NO: 27104 - protein, 9 aa, Homo sapiens
  AACR GENIE Results; SRC_p.R509Q; B4402
EEQPTFEYL

SEQ ID NO: 27105 - protein, 10 aa, Homo sapiens
  AACR GENIE Results; SRC_p.R509Q; B3501
EPEEQPTFEY

SEQ ID NO: 27106 - protein, 9 aa, Homo sapiens
  AACR GENIE Results; SRC_p.R509Q; B0702
KEPEEQPTF

SEQ ID NO: 27107 - protein, 8 aa, Homo sapiens
  AACR GENIE Results; SRC_p.R509Q; B3501
EPEEQPTF

SEQ ID NO: 27108 - protein, 11 aa, Homo sapiens
  AACR GENIE Results; SRC_p.R509Q; B4403
KEPEEQPTFEY

SEQ ID NO: 27109 - protein, 9 aa, Homo sapiens
  AACR GENIE Results; SRC_p.R509Q; A2402
KEPEEQPTF

SEQ ID NO: 27110 - protein, 9 aa, Homo sapiens
  AACR GENIE Results; STAG2_p.S853I; B1801
DEAIKIEAL

SEQ ID NO: 27111 - protein, 11 aa, Homo sapiens
  AACR GENIE Results; STAG2_p.S853I; B4001
QEDEAIKIEAL

SEQ ID NO: 27112 - protein, 9 aa, Homo sapiens
  AACR GENIE Results; STAG2_p.S853I; B4001
DEAIKIEAL

SEQ ID NO: 27113 - protein, 8 aa, Homo sapiens
  AACR GENIE Results; STAG2_p.S853I; B0801
EAIKIEAL

SEQ ID NO: 27114 - protein, 9 aa, Homo sapiens
  AACR GENIE Results; STAG2_p.S853I; B0801
DEAIKIEAL

SEQ ID NO: 27115 - protein, 8 aa, Homo sapiens
  AACR GENIE Results; STAG2_p.S853I; B4001
QEDEAIKI

SEQ ID NO: 27116 - protein, 8 aa, Homo sapiens
  AACR GENIE Results; STAG2_p.S853I; B3501
EAIKIEAL

SEQ ID NO: 27117 - protein, 8 aa, Homo sapiens
  AACR GENIE Results; STAG2_p.S853I; A2601
EAIKIEAL

SEQ ID NO: 27118 - protein, 8 aa, Homo sapiens
  AACR GENIE Results; STAG2_p.S853I; B1801
DEAIKIEA

SEQ ID NO: 27119 - protein, 8 aa, Homo sapiens
  AACR GENIE Results; STAG2_p.S853I; B5101
EAIKIEAL

SEQ ID NO: 27120 - protein, 9 aa, Homo sapiens
  AACR GENIE Results; STAG2_p.S853I; A0301
AIKIEALHK

SEQ ID NO: 27121 - protein, 8 aa, Homo sapiens
  AACR GENIE Results; STAG2_p.S853I; B1801
EAIKIEAL

SEQ ID NO: 27122 - protein, 8 aa, Homo sapiens
  AACR GENIE Results; STAG2_p.S853I; B4403
QEDEAIKI

SEQ ID NO: 27123 - protein, 9 aa, Homo sapiens
  AACR GENIE Results; STAG2_p.S853I; B4403
DEAIKIEAL

SEQ ID NO: 27124 - protein, 8 aa, Homo sapiens
  AACR GENIE Results; STAG2_p.S853I; B0702
EAIKIEAL

SEQ ID NO: 27125 - protein, 9 aa, Homo sapiens
  AACR GENIE Results; STAG2_p.S853I; A2601
EAIKIEALH

SEQ ID NO: 27126 - protein, 11 aa, Homo sapiens
  AACR GENIE Results; STAG2_p.S853I; B4403
QEDEAIKIEAL

SEQ ID NO: 27127 - protein, 8 aa, Homo sapiens
  AACR GENIE Results; STAG2_p.S853I; B1501
EAIKIEAL

SEQ ID NO: 27128 - protein, 9 aa, Homo sapiens
  AACR GENIE Results; STAT3_p.E616G; B1501
SSKGGGVTF

SEQ ID NO: 27129 - protein, 11 aa, Homo sapiens
  AACR GENIE Results; STAT3_p.E616G; B4403
SESSKGGGVTF

SEQ ID NO: 27130 - protein, 11 aa, Homo sapiens
  AACR GENIE Results; STAT3_p.E616G; B5701
SSKGGGVTFTW

SEQ ID NO: 27131 - protein, 9 aa, Homo sapiens
  AACR GENIE Results; STAT3_p.E616G; B5701
KGGGVTFTW

SEQ ID NO: 27132 - protein, 11 aa, Homo sapiens
  AACR GENIE Results; STAT3_p.E616G; B4001
SESSKGGGVTF

SEQ ID NO: 27133 - protein, 9 aa, Homo sapiens
  AACR GENIE Results; STAT3_p.E616G; C0202
SSKGGGVTF

SEQ ID NO: 27134 - protein, 9 aa, Homo sapiens
  AACR GENIE Results; STAT3_p.E616G; B5701
SSKGGGVTF

SEQ ID NO: 27135 - protein, 11 aa, Homo sapiens
  AACR GENIE Results; STAT3_p.E616G; B4402
SESSKGGGVTF

SEQ ID NO: 27136 - protein, 11 aa, Homo sapiens
  AACR GENIE Results; STAT3_p.E616G; B1801
SESSKGGGVTF

SEQ ID NO: 27137 - protein, 9 aa, Homo sapiens
  AACR GENIE Results; STAT3_p.E616G; A3201
SSKGGGVTF

SEQ ID NO: 27138 - protein, 9 aa, Homo sapiens
  AACR GENIE Results; STAT3_p.E616G; C1203
SSKGGGVTF

SEQ ID NO: 27139 - protein, 11 aa, Homo sapiens
  AACR GENIE Results; STAT3_p.E616G; B1501
SESSKGGGVTF

SEQ ID NO: 27140 - protein, 9 aa, Homo sapiens
  AACR GENIE Results; STAT3_p.E616G; B0702
SSKGGGVTF

SEQ ID NO: 27141 - protein, 11 aa, Homo sapiens
  AACR GENIE Results; STAT3_p.E616G; B0702
SESSKGGGVTF

SEQ ID NO: 27142 - protein, 11 aa, Homo sapiens
  AACR GENIE Results; STAT3_p.E616G; A2301
SESSKGGGVTF

SEQ ID NO: 27143 - protein, 9 aa, Homo sapiens
  AACR GENIE Results; STAT3_p.E616G; C1601
SSKGGGVTF

SEQ ID NO: 27144 - protein, 10 aa, Homo sapiens
  AACR GENIE Results; STAT3_p.E616G; A6801
ESSKGGGVTF

SEQ ID NO: 27145 - protein, 8 aa, Homo sapiens
  AACR GENIE Results; STAT3_p.E616G; B5701
GGGVTFTW

SEQ ID NO: 27146 - protein, 10 aa, Homo sapiens
  AACR GENIE Results; STAT3_p.E616G; A2601
ESSKGGGVTF

SEQ ID NO: 27147 - protein, 9 aa, Homo sapiens
  AACR GENIE Results; STAT3_p.E616G; A2301
KGGGVTFTW

SEQ ID NO: 27148 - protein, 9 aa, Homo sapiens
  AACR GENIE Results; STAT3_p.E616G; C0304
SSKGGGVTF

SEQ ID NO: 27149 - protein, 10 aa, Homo sapiens
  AACR GENIE Results; STAT3_p.E616G; B1501
ESSKGGGVTF

SEQ ID NO: 27150 - protein, 9 aa, Homo sapiens
  AACR GENIE Results; STAT3_p.E616G; B4403
KGGGVTFTW

SEQ ID NO: 27151 - protein, 8 aa, Homo sapiens
  AACR GENIE Results; STK11_p.A206Rfs*81; B5101
VAPRSLTC

SEQ ID NO: 27152 - protein, 10 aa, Homo sapiens
  AACR GENIE Results; STK11_p.A206Rfs*81; B5701
SSRPRLPTAW

SEQ ID NO: 27153 - protein, 9 aa, Homo sapiens
  AACR GENIE Results; STK11_p.A206Rfs*81; C1601
RATVAPRSL

SEQ ID NO: 27154 - protein, 9 aa, Homo sapiens
  AACR GENIE Results; STK11_p.A206Rfs*81; B0702
SPSTTSPRV

SEQ ID NO: 27155 - protein, 9 aa, Homo sapiens
  AACR GENIE Results; STK11_p.A206Rfs*81; B0702
TPAGPARAP

SEQ ID NO: 27156 - protein, 9 aa, Homo sapiens
  AACR GENIE Results; STK11_p.A206Rfs*81; A1101
GTTSTSCLR

SEQ ID NO: 27157 - protein, 10 aa, Homo sapiens
  AACR GENIE Results; STK11_p.A206Rfs*81; A6801
TPSRATVAPR

SEQ ID NO: 27158 - protein, 9 aa, Homo sapiens
  AACR GENIE Results; STK11_p.D194Y; A2301
SYLGVAEAL

SEQ ID NO: 27159 - protein, 9 aa, Homo sapiens
  AACR GENIE Results; STK11_p.D194Y; A2402
SYLGVAEAL

SEQ ID NO: 27160 - protein, 9 aa, Homo sapiens
  AACR GENIE Results; STK11_p.D194Y; B3501
TGGTLKISY

SEQ ID NO: 27161 - protein, 10 aa, Homo sapiens
  AACR GENIE Results; STK11_p.D237Y; A2402
VYIWSAGVTL

SEQ ID NO: 27162 - protein, 10 aa, Homo sapiens
  AACR GENIE Results; STK11_p.D277Rfs*8; B5701
GSYAIPGRLW

SEQ ID NO: 27163 - protein, 10 aa, Homo sapiens
  AACR GENIE Results; STK11_p.D53Afs*11; A3101
ACWGKALTAR

SEQ ID NO: 27164 - protein, 10 aa, Homo sapiens
  AACR GENIE Results; STK11_p.D53Gfs*110; A6801
HPAGGCVIQR

SEQ ID NO: 27165 - protein, 10 aa, Homo sapiens
  AACR GENIE Results; STK11_p.D53Gfs*110; A1101
STTEEVTAQK

SEQ ID NO: 27166 - protein, 9 aa, Homo sapiens
  AACR GENIE Results; STK11_p.D53Gfs*110; A6801
NVYGDGVLR

SEQ ID NO: 27167 - protein, 11 aa, Homo sapiens
  AACR GENIE Results; STK11_p.D53Gfs*110; B5701
NVYGDGVLRVW

SEQ ID NO: 27168 - protein, 10 aa, Homo sapiens
  AACR GENIE Results; STK11_p.D53Gfs*110; A6801
EAFPSVPGPR

SEQ ID NO: 27169 - protein, 9 aa, Homo sapiens
  AACR GENIE Results; STK11_p.D53Gfs*110; A1101
TTEEVTAQK

SEQ ID NO: 27170 - protein, 10 aa, Homo sapiens
  AACR GENIE Results; STK11_p.D53Gfs*110; A6801
STTEEVTAQK

SEQ ID NO: 27171 - protein, 10 aa, Homo sapiens
  AACR GENIE Results; STK11_p.D53Gfs*110; B4001
AENVYGDGVL

SEQ ID NO: 27172 - protein, 9 aa, Homo sapiens
  AACR GENIE Results; STK11_p.D53Gfs*110; B5101
FPSVPGPRV

SEQ ID NO: 27173 - protein, 10 aa, Homo sapiens
  AACR GENIE Results; STK11_p.D53Gfs*110; B1501
IQRREAENVY

SEQ ID NO: 27174 - protein, 10 aa, Homo sapiens
  AACR GENIE Results; STK11_p.D53Gfs*110; A6801
ENVYGDGVLR

SEQ ID NO: 27175 - protein, 9 aa, Homo sapiens
  AACR GENIE Results; STK11_p.D53Gfs*110; A6801
TTEEVTAQK

SEQ ID NO: 27176 - protein, 9 aa, Homo sapiens
  AACR GENIE Results; STK11_p.D53Gfs*110; B5701
YGDGVLRVW

SEQ ID NO: 27177 - protein, 10 aa, Homo sapiens
  AACR GENIE Results; STK11_p.D53Gfs*110; A2402
VYGDGVLRVW

SEQ ID NO: 27178 - protein, 8 aa, Homo sapiens
  AACR GENIE Results; STK11_p.D53Gfs*110; B1501
GQRAGEAF

SEQ ID NO: 27179 - protein, 8 aa, Homo sapiens
  AACR GENIE Results; STK11_p.D53Gfs*110; B0702
GPAGGRLL

SEQ ID NO: 27180 - protein, 10 aa, Homo sapiens
  AACR GENIE Results; STK11_p.D53Gfs*110; B3501
NAGQRAGEAF

SEQ ID NO: 27181 - protein, 10 aa, Homo sapiens
  AACR GENIE Results; STK11_p.D53Pfs*109; A1101
STTEEVTAQK

SEQ ID NO: 27182 - protein, 9 aa, Homo sapiens
  AACR GENIE Results; STK11_p.D53Pfs*109; A1101
TTEEVTAQK

SEQ ID NO: 27183 - protein, 10 aa, Homo sapiens
  AACR GENIE Results; STK11_p.D53Pfs*109; A2402
VYGDGVLRVW

SEQ ID NO: 27184 - protein, 10 aa, Homo sapiens
  AACR GENIE Results; STK11_p.D53Pfs*109; B3501
NAGQRAGEAF

SEQ ID NO: 27185 - protein, 10 aa, Homo sapiens
  AACR GENIE Results; STK11_p.D53Tfs*11; A3101
TCWGKALTAR

SEQ ID NO: 27186 - protein, 11 aa, Homo sapiens
  AACR GENIE Results; STK11_p.D53Tfs*11; A3101
GTCWGKALTAR

SEQ ID NO: 27187 - protein, 9 aa, Homo sapiens
  AACR GENIE Results; STK11_p.E199D; B1501
GVADALHPF

SEQ ID NO: 27188 - protein, 8 aa, Homo sapiens
  AACR GENIE Results; STK11_p.E223Rfs*64; B5101
VAPRSLTC

SEQ ID NO: 27189 - protein, 9 aa, Homo sapiens
  AACR GENIE Results; STK11_p.E223Rfs*64; C1601
RATVAPRSL

SEQ ID NO: 27190 - protein, 9 aa, Homo sapiens
  AACR GENIE Results; STK11_p.E223Rfs*64; B0702
SPSTTSPRV

SEQ ID NO: 27191 - protein, 9 aa, Homo sapiens
  AACR GENIE Results; STK11_p.E223Rfs*64; A6802
TVAPRSLTC

SEQ ID NO: 27192 - protein, 9 aa, Homo sapiens
  AACR GENIE Results; STK11_p.E223Rfs*64; A1101
GTTSTSCLR

SEQ ID NO: 27193 - protein, 10 aa, Homo sapiens
  AACR GENIE Results; STK11_p.E223Rfs*64; A6801
TPSRATVAPR

SEQ ID NO: 27194 - protein, 9 aa, Homo sapiens
  AACR GENIE Results; STK11_p.E57Kfs*7; C0802
MGDLLGKAL

SEQ ID NO: 27195 - protein, 9 aa, Homo sapiens
  AACR GENIE Results; STK11_p.E57Kfs*7; B0801
DLLGKALTA

SEQ ID NO: 27196 - protein, 11 aa, Homo sapiens
  AACR GENIE Results; STK11_p.E57Kfs*7; A3101
GDLLGKALTAR

SEQ ID NO: 27197 - protein, 9 aa, Homo sapiens
  AACR GENIE Results; STK11_p.E57Kfs*7; A3101
LLGKALTAR

SEQ ID NO: 27198 - protein, 10 aa, Homo sapiens
  AACR GENIE Results; STK11_p.E57Kfs*7; A6801
DLLGKALTAR

SEQ ID NO: 27199 - protein, 9 aa, Homo sapiens
  AACR GENIE Results; STK11_p.E57Kfs*7; A0301
LLGKALTAR

SEQ ID NO: 27200 - protein, 9 aa, Homo sapiens
  AACR GENIE Results; STK11_p.G196Afs*91; A1101
RTTPAGPAR

SEQ ID NO: 27201 - protein, 9 aa, Homo sapiens
  AACR GENIE Results; STK11_p.G196Afs*91; B0702
TPAGPARAP

SEQ ID NO: 27202 - protein, 9 aa, Homo sapiens
  AACR GENIE Results; STK11_p.G196Afs*91; B0702
SPSTTSPRV

SEQ ID NO: 27203 - protein, 9 aa, Homo sapiens
  AACR GENIE Results; STK11_p.G196Afs*91; A1101
GTTSTSCLR

SEQ ID NO: 27204 - protein, 9 aa, Homo sapiens
  AACR GENIE Results; STK11_p.G196V; B1501
VVAEALHPF

SEQ ID NO: 27205 - protein, 9 aa, Homo sapiens
  AACR GENIE Results; STK11_p.G242V; A2902
IWSAVVTLY

SEQ ID NO: 27206 - protein, 9 aa, Homo sapiens
  AACR GENIE Results; STK11_p.G251C; A0201
TLYNITTCL

SEQ ID NO: 27207 - protein, 9 aa, Homo sapiens
  AACR GENIE Results; STK11_p.G251V; A0201
TLYNITTVL

SEQ ID NO: 27208 - protein, 10 aa, Homo sapiens
  AACR GENIE Results; STK11_p.G276Afs*11; B0702
IPATVAPRSL

SEQ ID NO: 27209 - protein, 9 aa, Homo sapiens
  AACR GENIE Results; STK11_p.G61D; C1203
GSYDKVKEV

SEQ ID NO: 27210 - protein, 8 aa, Homo sapiens
  AACR GENIE Results; STK11_p.G61D; B0801
YDKVKEVL

SEQ ID NO: 27211 - protein, 9 aa, Homo sapiens
  AACR GENIE Results; STK11_p.G61D; C0401
SYDKVKEVL

SEQ ID NO: 27212 - protein, 9 aa, Homo sapiens
  AACR GENIE Results; STK11_p.H154L; B3501
FPVCQALGY

SEQ ID NO: 27213 - protein, 9 aa, Homo sapiens
  AACR GENIE Results; STK11_p.I161F; A0201
QLFDGLEYL

SEQ ID NO: 27214 - protein, 8 aa, Homo sapiens
  AACR GENIE Results; STK11_p.N181Tfs*106; B5101
VAPRSLTC

SEQ ID NO: 27215 - protein, 9 aa, Homo sapiens
  AACR GENIE Results; STK11_p.N181Tfs*106; A1101
RTTPAGPAR

SEQ ID NO: 27216 - protein, 9 aa, Homo sapiens
  AACR GENIE Results; STK11_p.N181Tfs*106; B0702
TPAGPARAP

SEQ ID NO: 27217 - protein, 9 aa, Homo sapiens
  AACR GENIE Results; STK11_p.N181Tfs*106; B0702
SPSTTSPRV

SEQ ID NO: 27218 - protein, 9 aa, Homo sapiens
  AACR GENIE Results; STK11_p.N181Tfs*106; A1101
GTTSTSCLR

SEQ ID NO: 27219 - protein, 11 aa, Homo sapiens
  AACR GENIE Results; STK11_p.P221L; B3501
LPEIANGLDTF

SEQ ID NO: 27220 - protein, 8 aa, Homo sapiens
  AACR GENIE Results; STK11_p.P221L; B5101
PAFQLPEI

SEQ ID NO: 27221 - protein, 9 aa, Homo sapiens
  AACR GENIE Results; STK11_p.P221L; B5101
SPAFQLPEI

SEQ ID NO: 27222 - protein, 9 aa, Homo sapiens
  AACR GENIE Results; STK11_p.S216F; B5101
FPAFQPPEI

SEQ ID NO: 27223 - protein, 9 aa, Homo sapiens
  AACR GENIE Results; STK11_p.S216F; B3503
FPAFQPPEI

SEQ ID NO: 27224 - protein, 9 aa, Homo sapiens
  AACR GENIE Results; STK11_p.S216F; B5501
FPAFQPPEI

SEQ ID NO: 27225 - protein, 9 aa, Homo sapiens
  AACR GENIE Results; STK11_p.S216F; B3502
FPAFQPPEI

SEQ ID NO: 27226 - protein, 9 aa, Homo sapiens
  AACR GENIE Results; STK11_p.S216F; B3501
FPAFQPPEI

SEQ ID NO: 27227 - protein, 10 aa, Homo sapiens
  AACR GENIE Results; STK11_p.W239C; A2601
DICSAGVTLY

SEQ ID NO: 27228 - protein, 10 aa, Homo sapiens
  AACR GENIE Results; STK11_p.W239S; A2601
DISSAGVTLY

SEQ ID NO: 27229 - protein, 9 aa, Homo sapiens
  AACR GENIE Results; STK11_p.W239S; B1501
ISSAGVTLY

SEQ ID NO: 27230 - protein, 9 aa, Homo sapiens
  AACR GENIE Results; STK11_p.W239S; A0201
KVDISSAGV

SEQ ID NO: 27231 - protein, 8 aa, Homo sapiens
  AACR GENIE Results; STK11_p.W239S; B1501
SSAGVTLY

SEQ ID NO: 27232 - protein, 11 aa, Homo sapiens
  AACR GENIE Results; TCF3_p.E77K; A1101
SSFDPSRTFSK

SEQ ID NO: 27233 - protein, 11 aa, Homo sapiens
  AACR GENIE Results; TCF3_p.E77K; A0301
SSFDPSRTFSK

SEQ ID NO: 27234 - protein, 9 aa, Homo sapiens
  AACR GENIE Results; TCF3_p.E77K; B5701
RTFSKGTHF

SEQ ID NO: 27235 - protein, 9 aa, Homo sapiens
  AACR GENIE Results; TCF3_p.T168M; A1101
GSLDMQPKK

SEQ ID NO: 27236 - protein, 8 aa, Homo sapiens
  AACR GENIE Results; TCF3_p.T168M; C0802
AADGSLDM

SEQ ID NO: 27237 - protein, 11 aa, Homo sapiens
  AACR GENIE Results; TCF3_p.T168M; A1101
AADGSLDMQPK

SEQ ID NO: 27238 - protein, 9 aa, Homo sapiens
  AACR GENIE Results; TCF3_p.T168M; A0201
SLDMQPKKV

SEQ ID NO: 27239 - protein, 8 aa, Homo sapiens
  AACR GENIE Results; TCF3_p.T168M; C0501
AADGSLDM

SEQ ID NO: 27240 - protein, 11 aa, Homo sapiens
  AACR GENIE Results; TCF3_p.T168M; A3101
GSLDMQPKKVR

SEQ ID NO: 27241 - protein, 9 aa, Homo sapiens
  AACR GENIE Results; TERT_p.H752R; A6801
YAVVQKAAR

SEQ ID NO: 27242 - protein, 9 aa, Homo sapiens
  AACR GENIE Results; TERT_p.H752R; A3303
YAVVQKAAR

SEQ ID NO: 27243 - protein, 10 aa, Homo sapiens
  AACR GENIE Results; TERT_p.H752R; A3101
RYAVVQKAAR

SEQ ID NO: 27244 - protein, 8 aa, Homo sapiens
  AACR GENIE Results; TET1_p.P1818L; B4901
SETELHFI

SEQ ID NO: 27245 - protein, 9 aa, Homo sapiens
  AACR GENIE Results; TET1_p.P1818L; B4001
PEVKSETEL

SEQ ID NO: 27246 - protein, 11 aa, Homo sapiens
  AACR GENIE Results; TET2_p.G1861V; A0201
FLDPDIGVVAV

SEQ ID NO: 27247 - protein, 9 aa, Homo sapiens
  AACR GENIE Results; TET2_p.G1861V; A0201
FLDPDIGVV

SEQ ID NO: 27248 - protein, 9 aa, Homo sapiens
  AACR GENIE Results; TET2_p.G1861V; B5101
DPDIGVVAV

SEQ ID NO: 27249 - protein, 9 aa, Homo sapiens
  AACR GENIE Results; TET2_p.G1861V; B3501
DPDIGVVAV

SEQ ID NO: 27250 - protein, 10 aa, Homo sapiens
  AACR GENIE Results; TET2_p.G1861V; A0201
FLDPDIGVVA

SEQ ID NO: 27251 - protein, 8 aa, Homo sapiens
  AACR GENIE Results; TET2_p.G1861V; A0201
FLDPDIGV

SEQ ID NO: 27252 - protein, 8 aa, Homo sapiens
  AACR GENIE Results; TET2_p.G1861V; A1101
PDIGVVAV

SEQ ID NO: 27253 - protein, 9 aa, Homo sapiens
  AACR GENIE Results; TET2_p.G1861V; C0501
FLDPDIGVV

SEQ ID NO: 27254 - protein, 11 aa, Homo sapiens
  AACR GENIE Results; TET2_p.G1861V; C0501
FLDPDIGVVAV

SEQ ID NO: 27255 - protein, 9 aa, Homo sapiens
  AACR GENIE Results; TET2_p.S1611Y; B3501
QAAGSYLNY

SEQ ID NO: 27256 - protein, 9 aa, Homo sapiens
  AACR GENIE Results; TET2_p.S1611Y; B1501
QAAGSYLNY

SEQ ID NO: 27257 - protein, 10 aa, Homo sapiens
  AACR GENIE Results; TET2_p.S1611Y; B1501
SQAAGSYLNY

SEQ ID NO: 27258 - protein, 9 aa, Homo sapiens
  AACR GENIE Results; TET2_p.S1611Y; A2601
QAAGSYLNY

SEQ ID NO: 27259 - protein, 9 aa, Homo sapiens
  AACR GENIE Results; TET2_p.S1611Y; A2902
QAAGSYLNY

SEQ ID NO: 27260 - protein, 10 aa, Homo sapiens
  AACR GENIE Results; TET2_p.S1611Y; A2601
SQAAGSYLNY

SEQ ID NO: 27261 - protein, 9 aa, Homo sapiens
  AACR GENIE Results; TET2_p.S1611Y; A6801
QAAGSYLNY

SEQ ID NO: 27262 - protein, 10 aa, Homo sapiens
  AACR GENIE Results; TET2_p.S1611Y; A1101
GSYLNYSNPM

SEQ ID NO: 27263 - protein, 9 aa, Homo sapiens
  AACR GENIE Results; TET2_p.S1611Y; A0101
QAAGSYLNY

SEQ ID NO: 27264 - protein, 9 aa, Homo sapiens
  AACR GENIE Results; TET2_p.S1611Y; A0301
QAAGSYLNY

SEQ ID NO: 27265 - protein, 10 aa, Homo sapiens
  AACR GENIE Results; TGFBR1_p.A202V; B5101
LPLLVQRTIV

SEQ ID NO: 27266 - protein, 9 aa, Homo sapiens
  AACR GENIE Results; TGFBR1_p.R487W; A0301
RLTALWIKK

SEQ ID NO: 27267 - protein, 11 aa, Homo sapiens
  AACR GENIE Results; TGFBR1_p.S241L; B5701
KIFSSREERLW

SEQ ID NO: 27268 - protein, 9 aa, Homo sapiens
  AACR GENIE Results; TGFBR1_p.S241L; B5701
FSSREERLW

SEQ ID NO: 27269 - protein, 8 aa, Homo sapiens
  AACR GENIE Results; TGFBR1_p.S241L; B5701
SSREERLW

SEQ ID NO: 27270 - protein, 9 aa, Homo sapiens
  AACR GENIE Results; TNFAIP3_p.I248V; C0602
YRYPVVLGY

SEQ ID NO: 27271 - protein, 9 aa, Homo sapiens
  AACR GENIE Results; TNFAIP3_p.I248V; C0702
YRYPVVLGY

SEQ ID NO: 27272 - protein, 9 aa, Homo sapiens
  AACR GENIE Results; TNFAIP3_p.I248V; A2902
YRYPVVLGY

SEQ ID NO: 27273 - protein, 9 aa, Homo sapiens
  AACR GENIE Results; TNFAIP3_p.I248V; B2702
YRYPVVLGY

SEQ ID NO: 27274 - protein, 9 aa, Homo sapiens
  AACR GENIE Results; TP53_p.A138P; B0702
LPKTCPVQL

SEQ ID NO: 27275 - protein, 9 aa, Homo sapiens
  AACR GENIE Results; TP53_p.A159P; A0301
RVRPMAIYK

SEQ ID NO: 27276 - protein, 9 aa, Homo sapiens
  AACR GENIE Results; TP53_p.A159P; A1101
RVRPMAIYK

SEQ ID NO: 27277 - protein, 9 aa, Homo sapiens
  AACR GENIE Results; TP53_p.A159P; A3101
RVRPMAIYK

SEQ ID NO: 27278 - protein, 9 aa, Homo sapiens
  AACR GENIE Results; TP53_p.A159V; A0301
RVRVMAIYK

SEQ ID NO: 27279 - protein, 11 aa, Homo sapiens
  AACR GENIE Results; TP53_p.A159V; A6802
STPPPGTRVRV

SEQ ID NO: 27280 - protein, 9 aa, Homo sapiens
  AACR GENIE Results; TP53_p.A161S; B1501
SIYKQSQHM

SEQ ID NO: 27281 - protein, 9 aa, Homo sapiens
  AACR GENIE Results; TP53_p.A161S; A0301
RVRAMSIYK

SEQ ID NO: 27282 - protein, 8 aa, Homo sapiens
  AACR GENIE Results; TP53_p.A161S; A0301
SIYKQSQH

SEQ ID NO: 27283 - protein, 9 aa, Homo sapiens
  AACR GENIE Results; TP53_p.A161S; B1302
SIYKQSQHM

SEQ ID NO: 27284 - protein, 9 aa, Homo sapiens
  AACR GENIE Results; TP53_p.A161T; A0301
RVRAMTIYK

SEQ ID NO: 27285 - protein, 9 aa, Homo sapiens
  AACR GENIE Results; TP53_p.A161T; B1501
TIYKQSQHM

SEQ ID NO: 27286 - protein, 9 aa, Homo sapiens
  AACR GENIE Results; TP53_p.A161T; B0801
TIYKQSQHM

SEQ ID NO: 27287 - protein, 9 aa, Homo sapiens
  AACR GENIE Results; TP53_p.A276F; B3501
NSFEVRVCF

SEQ ID NO: 27288 - protein, 9 aa, Homo sapiens
  AACR GENIE Results; TP53_p.A276F; B1501
NSFEVRVCF

SEQ ID NO: 27289 - protein, 9 aa, Homo sapiens
  AACR GENIE Results; TP53_p.A276F; C1203
NSFEVRVCF

SEQ ID NO: 27290 - protein, 9 aa, Homo sapiens
  AACR GENIE Results; TP53_p.A276F; C1601
NSFEVRVCF

SEQ ID NO: 27291 - protein, 9 aa, Homo sapiens
  AACR GENIE Results; TP53_p.A347V; B4001
RELNEVLEL

SEQ ID NO: 27292 - protein, 9 aa, Homo sapiens
  AACR GENIE Results; TP53_p.A347V; A3001
RELNEVLEL

SEQ ID NO: 27293 - protein, 9 aa, Homo sapiens
  AACR GENIE Results; TP53_p.A347V; B4403
RELNEVLEL

SEQ ID NO: 27294 - protein, 10 aa, Homo sapiens
  AACR GENIE Results; TP53_p.A347V; A6801
EVLELKDAQA

SEQ ID NO: 27295 - protein, 9 aa, Homo sapiens
  AACR GENIE Results; TP53_p.A347V; B4901
RELNEVLEL

SEQ ID NO: 27296 - protein, 9 aa, Homo sapiens
  AACR GENIE Results; TP53_p.A347V; A6801
ELNEVLELK

SEQ ID NO: 27297 - protein, 9 aa, Homo sapiens
  AACR GENIE Results; TP53_p.A347V; B2702
ELNEVLELK

SEQ ID NO: 27298 - protein, 9 aa, Homo sapiens
  AACR GENIE Results; TP53_p.A347V; A2301
RELNEVLEL

SEQ ID NO: 27299 - protein, 10 aa, Homo sapiens
  AACR GENIE Results; TP53_p.A347V; A2601
EVLELKDAQA

SEQ ID NO: 27300 - protein, 10 aa, Homo sapiens
  AACR GENIE Results; TP53_p.A70V; A0201
AVPPVAPAPA

SEQ ID NO: 27301 - protein, 9 aa, Homo sapiens
  AACR GENIE Results; TP53_p.A70V; B3501
MPEAVPPVA

SEQ ID NO: 27302 - protein, 9 aa, Homo sapiens
  AACR GENIE Results; TP53_p.A70V; A0201
RMPEAVPPV

SEQ ID NO: 27303 - protein, 8 aa, Homo sapiens
  AACR GENIE Results; TP53_p.A86Cfs*63; C0102
VLPTGQDL

SEQ ID NO: 27304 - protein, 8 aa, Homo sapiens
  AACR GENIE Results; TP53_p.A86Cfs*63; B5101
SPLLAPVI

SEQ ID NO: 27305 - protein, 9 aa, Homo sapiens
  AACR GENIE Results; TP53_p.A86Cfs*63; B3501
SPLLAPVIF

SEQ ID NO: 27306 - protein, 9 aa, Homo sapiens
  AACR GENIE Results; TP53_p.A86Cfs*63; B3501
LPCPQQDVL

SEQ ID NO: 27307 - protein, 9 aa, Homo sapiens
  AACR GENIE Results; TP53_p.A86Cfs*63; C0401
FWDSQVCDL

SEQ ID NO: 27308 - protein, 9 aa, Homo sapiens
  AACR GENIE Results; TP53_p.A86Cfs*63; A2301
RFPSGLLAF

SEQ ID NO: 27309 - protein, 11 aa, Homo sapiens
  AACR GENIE Results; TP53_p.A86Cfs*63; B3501
FPENLPGQLRF

SEQ ID NO: 27310 - protein, 11 aa, Homo sapiens
  AACR GENIE Results; TP53_p.A86Cfs*63; A0201
VLPTGQDLPCA

SEQ ID NO: 27311 - protein, 9 aa, Homo sapiens
  AACR GENIE Results; TP53_p.A86Cfs*63; B1302
GQLRFPSGL

SEQ ID NO: 27312 - protein, 9 aa, Homo sapiens
  AACR GENIE Results; TP53_p.A86Cfs*63; B3501
FPENLPGQL

SEQ ID NO: 27313 - protein, 9 aa, Homo sapiens
  AACR GENIE Results; TP53_p.A86Cfs*63; C0401
FPENLPGQL

SEQ ID NO: 27314 - protein, 9 aa, Homo sapiens
  AACR GENIE Results; TP53_p.A86Cfs*63; A2402
RFPSGLLAF

SEQ ID NO: 27315 - protein, 10 aa, Homo sapiens
  AACR GENIE Results; TP53_p.A86Cfs*63; C0602
LRFPSGLLAF

SEQ ID NO: 27316 - protein, 9 aa, Homo sapiens
  AACR GENIE Results; TP53_p.A86Cfs*63; C0102
RFPSGLLAF

SEQ ID NO: 27317 - protein, 9 aa, Homo sapiens
  AACR GENIE Results; TP53_p.A86Cfs*63; B3501
LPTGQDLPC

SEQ ID NO: 27318 - protein, 9 aa, Homo sapiens
  AACR GENIE Results; TP53_p.A86Cfs*63; B1302
GQDLPCAAV

SEQ ID NO: 27319 - protein, 10 aa, Homo sapiens
  AACR GENIE Results; TP53_p.A86Cfs*63; A2301
RFPSGLLAFW

SEQ ID NO: 27320 - protein, 10 aa, Homo sapiens
  AACR GENIE Results; TP53_p.A86Cfs*63; A2402
RFPSGLLAFW

SEQ ID NO: 27321 - protein, 9 aa, Homo sapiens
  AACR GENIE Results; TP53_p.A86Cfs*63; B5101
TSPLLAPVI

SEQ ID NO: 27322 - protein, 9 aa, Homo sapiens
  AACR GENIE Results; TP53_p.A86Cfs*63; C0802
FWDSQVCDL

SEQ ID NO: 27323 - protein, 9 aa, Homo sapiens
  AACR GENIE Results; TP53_p.A86Cfs*63; C0802
FPENLPGQL

SEQ ID NO: 27324 - protein, 9 aa, Homo sapiens
  AACR GENIE Results; TP53_p.A86Cfs*63; B5101
LPCPQQDVL

SEQ ID NO: 27325 - protein, 9 aa, Homo sapiens
  AACR GENIE Results; TP53_p.A86Cfs*63; B0702
LPCPQQDVL

SEQ ID NO: 27326 - protein, 10 aa, Homo sapiens
  AACR GENIE Results; TP53_p.A86Cfs*63; C0702
LRFPSGLLAF

SEQ ID NO: 27327 - protein, 10 aa, Homo sapiens
  AACR GENIE Results; TP53_p.A86Cfs*63; C0701
LRFPSGLLAF

SEQ ID NO: 27328 - protein, 11 aa, Homo sapiens
  AACR GENIE Results; TP53_p.C135F; A2402
TYSPALNKMFF

SEQ ID NO: 27329 - protein, 11 aa, Homo sapiens
  AACR GENIE Results; TP53_p.C135F; A2301
TYSPALNKMFF

SEQ ID NO: 27330 - protein, 9 aa, Homo sapiens
  AACR GENIE Results; TP53_p.C135F; B0702
SPALNKMFF

SEQ ID NO: 27331 - protein, 9 aa, Homo sapiens
  AACR GENIE Results; TP53_p.C135F; A0201
FQLAKTCPV

SEQ ID NO: 27332 - protein, 9 aa, Homo sapiens
  AACR GENIE Results; TP53_p.C135F; B1302
FQLAKTCPV

SEQ ID NO: 27333 - protein, 9 aa, Homo sapiens
  AACR GENIE Results; TP53_p.C135F; A0201
ALNKMFFQL

SEQ ID NO: 27334 - protein, 9 aa, Homo sapiens
  AACR GENIE Results; TP53_p.C135Y; B3501
SPALNKMFY

SEQ ID NO: 27335 - protein, 11 aa, Homo sapiens
  AACR GENIE Results; TP53_p.C135Y; A2402
TYSPALNKMFY

SEQ ID NO: 27336 - protein, 9 aa, Homo sapiens
  AACR GENIE Results; TP53_p.C135Y; A0201
YQLAKTCPV

SEQ ID NO: 27337 - protein, 11 aa, Homo sapiens
  AACR GENIE Results; TP53_p.C135Y; A2902
TYSPALNKMFY

SEQ ID NO: 27338 - protein, 9 aa, Homo sapiens
  AACR GENIE Results; TP53_p.C135Y; B1302
YQLAKTCPV

SEQ ID NO: 27339 - protein, 9 aa, Homo sapiens
  AACR GENIE Results; TP53_p.C135Y; A0201
ALNKMFYQL

SEQ ID NO: 27340 - protein, 8 aa, Homo sapiens
  AACR GENIE Results; TP53_p.C141W; B5701
KTWPVQLW

SEQ ID NO: 27341 - protein, 10 aa, Homo sapiens
  AACR GENIE Results; TP53_p.C141W; B5701
LAKTWPVQLW

SEQ ID NO: 27342 - protein, 9 aa, Homo sapiens
  AACR GENIE Results; TP53_p.C141W; C0202
LAKTWPVQL

SEQ ID NO: 27343 - protein, 9 aa, Homo sapiens
  AACR GENIE Results; TP53_p.C141W; C1203
LAKTWPVQL

SEQ ID NO: 27344 - protein, 9 aa, Homo sapiens
  AACR GENIE Results; TP53_p.C141Y; C1502
KTYPVQLWV

SEQ ID NO: 27345 - protein, 8 aa, Homo sapiens
  AACR GENIE Results; TP53_p.C141Y; B5701
KTYPVQLW

SEQ ID NO: 27346 - protein, 10 aa, Homo sapiens
  AACR GENIE Results; TP53_p.C141Y; B5701
LAKTYPVQLW

SEQ ID NO: 27347 - protein, 8 aa, Homo sapiens
  AACR GENIE Results; TP53_p.C141Y; B5801
KTYPVQLW

SEQ ID NO: 27348 - protein, 9 aa, Homo sapiens
  AACR GENIE Results; TP53_p.C141Y; A6802
KTYPVQLWV

SEQ ID NO: 27349 - protein, 8 aa, Homo sapiens
  AACR GENIE Results; TP53_p.C141Y; B1501
FCQLAKTY

SEQ ID NO: 27350 - protein, 9 aa, Homo sapiens
  AACR GENIE Results; TP53_p.C141Y; C1701
LAKTYPVQL

SEQ ID NO: 27351 - protein, 9 aa, Homo sapiens
  AACR GENIE Results; TP53_p.C141Y; B0801
LAKTYPVQL

SEQ ID NO: 27352 - protein, 9 aa, Homo sapiens
  AACR GENIE Results; TP53_p.C141Y; C0202
LAKTYPVQL

SEQ ID NO: 27353 - protein, 9 aa, Homo sapiens
  AACR GENIE Results; TP53_p.C141Y; C1203
LAKTYPVQL

SEQ ID NO: 27354 - protein, 9 aa, Homo sapiens
  AACR GENIE Results; TP53_p.C141Y; C1601
LAKTYPVQL

SEQ ID NO: 27355 - protein, 9 aa, Homo sapiens
  AACR GENIE Results; TP53_p.C141Y; C1203
KTYPVQLWV

SEQ ID NO: 27356 - protein, 9 aa, Homo sapiens
  AACR GENIE Results; TP53_p.C141Y; B1302
CQLAKTYPV

SEQ ID NO: 27357 - protein, 9 aa, Homo sapiens
  AACR GENIE Results; TP53_p.C176F; B5701
HMTEVVRRF

SEQ ID NO: 27358 - protein, 8 aa, Homo sapiens
  AACR GENIE Results; TP53_p.C176F; B5701
MTEVVRRF

SEQ ID NO: 27359 - protein, 9 aa, Homo sapiens
  AACR GENIE Results; TP53_p.C176F; A0301
HMTEVVRRF

SEQ ID NO: 27360 - protein, 11 aa, Homo sapiens
  AACR GENIE Results; TP53_p.C176S; A3303
EVVRRSPHHER

SEQ ID NO: 27361 - protein, 9 aa, Homo sapiens
  AACR GENIE Results; TP53_p.C176Y; A2902
HMTEVVRRY

SEQ ID NO: 27362 - protein, 9 aa, Homo sapiens
  AACR GENIE Results; TP53_p.C176Y; C1601
HMTEVVRRY

SEQ ID NO: 27363 - protein, 9 aa, Homo sapiens
  AACR GENIE Results; TP53_p.C176Y; B3501
HMTEVVRRY

SEQ ID NO: 27364 - protein, 9 aa, Homo sapiens
  AACR GENIE Results; TP53_p.C176Y; B4403
HMTEVVRRY

SEQ ID NO: 27365 - protein, 9 aa, Homo sapiens
  AACR GENIE Results; TP53_p.C176Y; B5701
HMTEVVRRY

SEQ ID NO: 27366 - protein, 9 aa, Homo sapiens
  AACR GENIE Results; TP53_p.C238F; C1402
NYMFNSSCM

SEQ ID NO: 27367 - protein, 9 aa, Homo sapiens
  AACR GENIE Results; TP53_p.C238F; B5701
TTIHYNYMF

SEQ ID NO: 27368 - protein, 9 aa, Homo sapiens
  AACR GENIE Results; TP53_p.C238F; A2402
NYMFNSSCM

SEQ ID NO: 27369 - protein, 8 aa, Homo sapiens
  AACR GENIE Results; TP53_p.C238F; B1501
YMFNSSCM

SEQ ID NO: 27370 - protein, 8 aa, Homo sapiens
  AACR GENIE Results; TP53_p.C238F; C1402
YMFNSSCM

SEQ ID NO: 27371 - protein, 9 aa, Homo sapiens
  AACR GENIE Results; TP53_p.C238R; A6801
TTIHYNYMR

SEQ ID NO: 27372 - protein, 9 aa, Homo sapiens
  AACR GENIE Results; TP53_p.C238R; B0801
YNYMRNSSC

SEQ ID NO: 27373 - protein, 9 aa, Homo sapiens
  AACR GENIE Results; TP53_p.C238S; A2402
NYMSNSSCM

SEQ ID NO: 27374 - protein, 8 aa, Homo sapiens
  AACR GENIE Results; TP53_p.C238S; B1501
YMSNSSCM

SEQ ID NO: 27375 - protein, 9 aa, Homo sapiens
  AACR GENIE Results; TP53_p.C238W; B5701
TTIHYNYMW

SEQ ID NO: 27376 - protein, 8 aa, Homo sapiens
  AACR GENIE Results; TP53_p.C238Y; B1502
YMYNSSCM

SEQ ID NO: 27377 - protein, 9 aa, Homo sapiens
  AACR GENIE Results; TP53_p.C238Y; A2902
TTIHYNYMY

SEQ ID NO: 27378 - protein, 9 aa, Homo sapiens
  AACR GENIE Results; TP53_p.C238Y; C1402
NYMYNSSCM

SEQ ID NO: 27379 - protein, 9 aa, Homo sapiens
  AACR GENIE Results; TP53_p.C238Y; A2901
TTIHYNYMY

SEQ ID NO: 27380 - protein, 8 aa, Homo sapiens
  AACR GENIE Results; TP53_p.C238Y; C0801
YMYNSSCM

SEQ ID NO: 27381 - protein, 9 aa, Homo sapiens
  AACR GENIE Results; TP53_p.C238Y; B5701
TTIHYNYMY

SEQ ID NO: 27382 - protein, 8 aa, Homo sapiens
  AACR GENIE Results; TP53_p.C238Y; B1501
YMYNSSCM

SEQ ID NO: 27383 - protein, 9 aa, Homo sapiens
  AACR GENIE Results; TP53_p.C242Afs*5; B3906
MCNSSAWAA

SEQ ID NO: 27384 - protein, 9 aa, Homo sapiens
  AACR GENIE Results; TP53_p.C242F; A6801
SSFMGGMNR

SEQ ID NO: 27385 - protein, 9 aa, Homo sapiens
  AACR GENIE Results; TP53_p.C242F; A3101
SSFMGGMNR

SEQ ID NO: 27386 - protein, 9 aa, Homo sapiens
  AACR GENIE Results; TP53_p.C242F; A3303
SSFMGGMNR

SEQ ID NO: 27387 - protein, 10 aa, Homo sapiens
  AACR GENIE Results; TP53_p.C242F; A6801
NSSFMGGMNR

SEQ ID NO: 27388 - protein, 9 aa, Homo sapiens
  AACR GENIE Results; TP53_p.C242F; A1101
SSFMGGMNR

SEQ ID NO: 27389 - protein, 8 aa, Homo sapiens
  AACR GENIE Results; TP53_p.C242F; A3303
SFMGGMNR

SEQ ID NO: 27390 - protein, 8 aa, Homo sapiens
  AACR GENIE Results; TP53_p.C242F; C1402
NYMCNSSF

SEQ ID NO: 27391 - protein, 9 aa, Homo sapiens
  AACR GENIE Results; TP53_p.C242F; A3301
SSFMGGMNR

SEQ ID NO: 27392 - protein, 8 aa, Homo sapiens
  AACR GENIE Results; TP53_p.C242F; A3101
SFMGGMNR

SEQ ID NO: 27393 - protein, 10 aa, Homo sapiens
  AACR GENIE Results; TP53_p.C242F; A3303
NSSFMGGMNR

SEQ ID NO: 27394 - protein, 8 aa, Homo sapiens
  AACR GENIE Results; TP53_p.C242F; A1101
SFMGGMNR

SEQ ID NO: 27395 - protein, 9 aa, Homo sapiens
  AACR GENIE Results; TP53_p.C242F; A3101
SFMGGMNRR

SEQ ID NO: 27396 - protein, 9 aa, Homo sapiens
  AACR GENIE Results; TP53_p.C242F; A3303
SFMGGMNRR

SEQ ID NO: 27397 - protein, 8 aa, Homo sapiens
  AACR GENIE Results; TP53_p.C242F; A3301
SFMGGMNR

SEQ ID NO: 27398 - protein, 10 aa, Homo sapiens
  AACR GENIE Results; TP53_p.C242F; A6801
SSFMGGMNRR

SEQ ID NO: 27399 - protein, 9 aa, Homo sapiens
  AACR GENIE Results; TP53_p.C242F; A0301
SSFMGGMNR

SEQ ID NO: 27400 - protein, 9 aa, Homo sapiens
  AACR GENIE Results; TP53_p.C242W; A3101
SSWMGGMNR

SEQ ID NO: 27401 - protein, 9 aa, Homo sapiens
  AACR GENIE Results; TP53_p.C242W; A6801
SSWMGGMNR

SEQ ID NO: 27402 - protein, 9 aa, Homo sapiens
  AACR GENIE Results; TP53_p.C242Y; A1101
SSYMGGMNR

SEQ ID NO: 27403 - protein, 9 aa, Homo sapiens
  AACR GENIE Results; TP53_p.C242Y; A3101
SSYMGGMNR

SEQ ID NO: 27404 - protein, 9 aa, Homo sapiens
  AACR GENIE Results; TP53_p.C242Y; A6801
SSYMGGMNR

SEQ ID NO: 27405 - protein, 10 aa, Homo sapiens
  AACR GENIE Results; TP53_p.C242Y; A6801
NSSYMGGMNR

SEQ ID NO: 27406 - protein, 9 aa, Homo sapiens
  AACR GENIE Results; TP53_p.C242Y; A0301
SSYMGGMNR

SEQ ID NO: 27407 - protein, 8 aa, Homo sapiens
  AACR GENIE Results; TP53_p.C242Y; A3101
SYMGGMNR

SEQ ID NO: 27408 - protein, 9 aa, Homo sapiens
  AACR GENIE Results; TP53_p.C242Y; A3101
SYMGGMNRR

SEQ ID NO: 27409 - protein, 8 aa, Homo sapiens
  AACR GENIE Results; TP53_p.C242Y; A1101
SYMGGMNR

SEQ ID NO: 27410 - protein, 10 aa, Homo sapiens
  AACR GENIE Results; TP53_p.C242Y; A1101
SSYMGGMNRR

SEQ ID NO: 27411 - protein, 10 aa, Homo sapiens
  AACR GENIE Results; TP53_p.C242Y; A6801
SSYMGGMNRR

SEQ ID NO: 27412 - protein, 10 aa, Homo sapiens
  AACR GENIE Results; TP53_p.C242Y; A3101
SSYMGGMNRR

SEQ ID NO: 27413 - protein, 9 aa, Homo sapiens
  AACR GENIE Results; TP53_p.C242Y; B2705
SSYMGGMNR

SEQ ID NO: 27414 - protein, 10 aa, Homo sapiens
  AACR GENIE Results; TP53_p.C275F; B2705
GRNSFEVRVF

SEQ ID NO: 27415 - protein, 9 aa, Homo sapiens
  AACR GENIE Results; TP53_p.C275F; C0701
RNSFEVRVF

SEQ ID NO: 27416 - protein, 8 aa, Homo sapiens
  AACR GENIE Results; TP53_p.C275F; C1203
NSFEVRVF

SEQ ID NO: 27417 - protein, 8 aa, Homo sapiens
  AACR GENIE Results; TP53_p.C275F; B1501
NSFEVRVF

SEQ ID NO: 27418 - protein, 8 aa, Homo sapiens
  AACR GENIE Results; TP53_p.C275F; B5701
NSFEVRVF

SEQ ID NO: 27419 - protein, 8 aa, Homo sapiens
  AACR GENIE Results; TP53_p.C275F; C1601
NSFEVRVF

SEQ ID NO: 27420 - protein, 9 aa, Homo sapiens
  AACR GENIE Results; TP53_p.C275F; B5701
RNSFEVRVF

SEQ ID NO: 27421 - protein, 8 aa, Homo sapiens
  AACR GENIE Results; TP53_p.C275F; B1801
NSFEVRVF

SEQ ID NO: 27422 - protein, 10 aa, Homo sapiens
  AACR GENIE Results; TP53_p.C275F; C0701
GRNSFEVRVF

SEQ ID NO: 27423 - protein, 9 aa, Homo sapiens
  AACR GENIE Results; TP53_p.C275F; C1601
RNSFEVRVF

SEQ ID NO: 27424 - protein, 10 aa, Homo sapiens
  AACR GENIE Results; TP53_p.C275F; C0602
GRNSFEVRVF

SEQ ID NO: 27425 - protein, 9 aa, Homo sapiens
  AACR GENIE Results; TP53_p.C275Lfs*31; B0702
SPRAAPREH

SEQ ID NO: 27426 - protein, 9 aa, Homo sapiens
  AACR GENIE Results; TP53_p.C275Lfs*31; B0702
SPQERGASP

SEQ ID NO: 27427 - protein, 9 aa, Homo sapiens
  AACR GENIE Results; TP53_p.C275Lfs*31; A3101
RGRESPQER

SEQ ID NO: 27428 - protein, 9 aa, Homo sapiens
  AACR GENIE Results; TP53_p.C275Lfs*31; A3101
LSWERPAHR

SEQ ID NO: 27429 - protein, 11 aa, Homo sapiens
  AACR GENIE Results; TP53_p.C275Lfs*31; A6801
ESPQERGASPR

SEQ ID NO: 27430 - protein, 8 aa, Homo sapiens
  AACR GENIE Results; TP53_p.C275W; B5701
NSFEVRVW

SEQ ID NO: 27431 - protein, 9 aa, Homo sapiens
  AACR GENIE Results; TP53_p.C275W; B5701
RNSFEVRVW

SEQ ID NO: 27432 - protein, 8 aa, Homo sapiens
  AACR GENIE Results; TP53_p.C275W; C1203
NSFEVRVW

SEQ ID NO: 27433 - protein, 8 aa, Homo sapiens
  AACR GENIE Results; TP53_p.C275Y; B1501
NSFEVRVY

SEQ ID NO: 27434 - protein, 8 aa, Homo sapiens
  AACR GENIE Results; TP53_p.C275Y; C1203
NSFEVRVY

SEQ ID NO: 27435 - protein, 8 aa, Homo sapiens
  AACR GENIE Results; TP53_p.C275Y; B1801
NSFEVRVY

SEQ ID NO: 27436 - protein, 10 aa, Homo sapiens
  AACR GENIE Results; TP53_p.C275Y; B2705
GRNSFEVRVY

SEQ ID NO: 27437 - protein, 9 aa, Homo sapiens
  AACR GENIE Results; TP53_p.C275Y; C1601
RNSFEVRVY

SEQ ID NO: 27438 - protein, 8 aa, Homo sapiens
  AACR GENIE Results; TP53_p.C275Y; C1601
NSFEVRVY

SEQ ID NO: 27439 - protein, 9 aa, Homo sapiens
  AACR GENIE Results; TP53_p.C275Y; A6802
NSFEVRVYA

SEQ ID NO: 27440 - protein, 10 aa, Homo sapiens
  AACR GENIE Results; TP53_p.C275Y; B2702
GRNSFEVRVY

SEQ ID NO: 27441 - protein, 9 aa, Homo sapiens
  AACR GENIE Results; TP53_p.C275Y; C0701
RNSFEVRVY

SEQ ID NO: 27442 - protein, 8 aa, Homo sapiens
  AACR GENIE Results; TP53_p.C275Y; B3501
NSFEVRVY

SEQ ID NO: 27443 - protein, 8 aa, Homo sapiens
  AACR GENIE Results; TP53_p.C275Y; B5701
NSFEVRVY

SEQ ID NO: 27444 - protein, 8 aa, Homo sapiens
  AACR GENIE Results; TP53_p.C275Y; B5801
NSFEVRVY

SEQ ID NO: 27445 - protein, 9 aa, Homo sapiens
  AACR GENIE Results; TP53_p.C275Y; B5701
RNSFEVRVY

SEQ ID NO: 27446 - protein, 10 aa, Homo sapiens
  AACR GENIE Results; TP53_p.C275Y; C0701
GRNSFEVRVY

SEQ ID NO: 27447 - protein, 8 aa, Homo sapiens
  AACR GENIE Results; TP53_p.C275Y; B0801
NSFEVRVY

SEQ ID NO: 27448 - protein, 8 aa, Homo sapiens
  AACR GENIE Results; TP53_p.C277F; B1801
FEVRVCAF

SEQ ID NO: 27449 - protein, 9 aa, Homo sapiens
  AACR GENIE Results; TP53_p.C277F; C1402
SFEVRVCAF

SEQ ID NO: 27450 - protein, 9 aa, Homo sapiens
  AACR GENIE Results; TP53_p.D208V; A2402
EYLDVRNTF

SEQ ID NO: 27451 - protein, 10 aa, Homo sapiens
  AACR GENIE Results; TP53_p.D208V; B4403
VEYLDVRNTF

SEQ ID NO: 27452 - protein, 10 aa, Homo sapiens
  AACR GENIE Results; TP53_p.D208V; B1801
VEYLDVRNTF

SEQ ID NO: 27453 - protein, 8 aa, Homo sapiens
  AACR GENIE Results; TP53_p.D208V; C0501
YLDVRNTF

SEQ ID NO: 27454 - protein, 10 aa, Homo sapiens
  AACR GENIE Results; TP53_p.D208V; B4402
VEYLDVRNTF

SEQ ID NO: 27455 - protein, 8 aa, Homo sapiens
  AACR GENIE Results; TP53_p.D208V; C0401
YLDVRNTF

SEQ ID NO: 27456 - protein, 10 aa, Homo sapiens
  AACR GENIE Results; TP53_p.D208V; B4001
VEYLDVRNTF

SEQ ID NO: 27457 - protein, 8 aa, Homo sapiens
  AACR GENIE Results; TP53_p.D208V; B0801
YLDVRNTF

SEQ ID NO: 27458 - protein, 10 aa, Homo sapiens
  AACR GENIE Results; TP53_p.D208V; B0702
VEYLDVRNTF

SEQ ID NO: 27459 - protein, 10 aa, Homo sapiens
  AACR GENIE Results; TP53_p.D208V; B1501
VEYLDVRNTF

SEQ ID NO: 27460 - protein, 8 aa, Homo sapiens
  AACR GENIE Results; TP53_p.D208V; A0101
YLDVRNTF

SEQ ID NO: 27461 - protein, 9 aa, Homo sapiens
  AACR GENIE Results; TP53_p.D259Y; A2902
ILTIITLEY

SEQ ID NO: 27462 - protein, 10 aa, Homo sapiens
  AACR GENIE Results; TP53_p.D259Y; A6801
EYSSGNLLGR

SEQ ID NO: 27463 - protein, 9 aa, Homo sapiens
  AACR GENIE Results; TP53_p.D259Y; A6801
YSSGNLLGR

SEQ ID NO: 27464 - protein, 9 aa, Homo sapiens
  AACR GENIE Results; TP53_p.D259Y; B1501
ILTIITLEY

SEQ ID NO: 27465 - protein, 9 aa, Homo sapiens
  AACR GENIE Results; TP53_p.D259Y; B4001
LEYSSGNLL

SEQ ID NO: 27466 - protein, 8 aa, Homo sapiens
  AACR GENIE Results; TP53_p.D259Y; A0101
LTIITLEY

SEQ ID NO: 27467 - protein, 9 aa, Homo sapiens
  AACR GENIE Results; TP53_p.D259Y; A0301
ILTIITLEY

SEQ ID NO: 27468 - protein, 9 aa, Homo sapiens
  AACR GENIE Results; TP53_p.D259Y; A3101
YSSGNLLGR

SEQ ID NO: 27469 - protein, 9 aa, Homo sapiens
  AACR GENIE Results; TP53_p.D259Y; B3501
ILTIITLEY

SEQ ID NO: 27470 - protein, 10 aa, Homo sapiens
  AACR GENIE Results; TP53_p.D259Y; A3101
EYSSGNLLGR

SEQ ID NO: 27471 - protein, 10 aa, Homo sapiens
  AACR GENIE Results; TP53_p.D259Y; B3801
TLEYSSGNLL

SEQ ID NO: 27472 - protein, 9 aa, Homo sapiens
  AACR GENIE Results; TP53_p.D259Y; A0101
ILTIITLEY

SEQ ID NO: 27473 - protein, 9 aa, Homo sapiens
  AACR GENIE Results; TP53_p.D259Y; A1101
YSSGNLLGR

SEQ ID NO: 27474 - protein, 8 aa, Homo sapiens
  AACR GENIE Results; TP53_p.D259Y; B1501
LTIITLEY

SEQ ID NO: 27475 - protein, 9 aa, Homo sapiens
  AACR GENIE Results; TP53_p.D259Y; A2301
ILTIITLEY

SEQ ID NO: 27476 - protein, 10 aa, Homo sapiens
  AACR GENIE Results; TP53_p.D259Y; A2902
PILTIITLEY

SEQ ID NO: 27477 - protein, 11 aa, Homo sapiens
  AACR GENIE Results; TP53_p.D259Y; B3501
RPILTIITLEY

SEQ ID NO: 27478 - protein, 9 aa, Homo sapiens
  AACR GENIE Results; TP53_p.D259Y; B3801
LEYSSGNLL

SEQ ID NO: 27479 - protein, 9 aa, Homo sapiens
  AACR GENIE Results; TP53_p.D259Y; B5101
LEYSSGNLL

SEQ ID NO: 27480 - protein, 8 aa, Homo sapiens
  AACR GENIE Results; TP53_p.E224D; B5101
VPYEPPDV

SEQ ID NO: 27481 - protein, 8 aa, Homo sapiens
  AACR GENIE Results; TP53_p.E224D; B5501
VPYEPPDV

SEQ ID NO: 27482 - protein, 8 aa, Homo sapiens
  AACR GENIE Results; TP53_p.E224D; B5502
VPYEPPDV

SEQ ID NO: 27483 - protein, 10 aa, Homo sapiens
  AACR GENIE Results; TP53_p.E224D; A0206
VVVPYEPPDV

SEQ ID NO: 27484 - protein, 9 aa, Homo sapiens
  AACR GENIE Results; TP53_p.E224D; B5502
VPYEPPDVG

SEQ ID NO: 27485 - protein, 10 aa, Homo sapiens
  AACR GENIE Results; TP53_p.E224D; A6802
VVVPYEPPDV

SEQ ID NO: 27486 - protein, 9 aa, Homo sapiens
  AACR GENIE Results; TP53_p.E224D; A0207
VVPYEPPDV

SEQ ID NO: 27487 - protein, 9 aa, Homo sapiens
  AACR GENIE Results; TP53_p.E224D; B5101
VPYEPPDVG

SEQ ID NO: 27488 - protein, 8 aa, Homo sapiens
  AACR GENIE Results; TP53_p.E224D; B3906
VPYEPPDV

SEQ ID NO: 27489 - protein, 10 aa, Homo sapiens
  AACR GENIE Results; TP53_p.E224D; B5502
VPYEPPDVGS

SEQ ID NO: 27490 - protein, 9 aa, Homo sapiens
  AACR GENIE Results; TP53_p.E224D; A0206
VVPYEPPDV

SEQ ID NO: 27491 - protein, 10 aa, Homo sapiens
  AACR GENIE Results; TP53_p.E224D; A0201
VVVPYEPPDV

SEQ ID NO: 27492 - protein, 10 aa, Homo sapiens
  AACR GENIE Results; TP53_p.E224D; A0203
VVVPYEPPDV

SEQ ID NO: 27493 - protein, 9 aa, Homo sapiens
  AACR GENIE Results; TP53_p.E258D; C0802
TLDDSSGNL

SEQ ID NO: 27494 - protein, 10 aa, Homo sapiens
  AACR GENIE Results; TP53_p.E258D; C0802
TLDDSSGNLL

SEQ ID NO: 27495 - protein, 10 aa, Homo sapiens
  AACR GENIE Results; TP53_p.E258D; A6801
DDSSGNLLGR

SEQ ID NO: 27496 - protein, 10 aa, Homo sapiens
  AACR GENIE Results; TP53_p.E258D; B3801
TLDDSSGNLL

SEQ ID NO: 27497 - protein, 10 aa, Homo sapiens
  AACR GENIE Results; TP53_p.E258D; A3301
DDSSGNLLGR

SEQ ID NO: 27498 - protein, 10 aa, Homo sapiens
  AACR GENIE Results; TP53_p.E258D; B3901
TLDDSSGNLL

SEQ ID NO: 27499 - protein, 10 aa, Homo sapiens
  AACR GENIE Results; TP53_p.E258D; C0501
TLDDSSGNLL

SEQ ID NO: 27500 - protein, 9 aa, Homo sapiens
  AACR GENIE Results; TP53_p.E258D; C0501
TLDDSSGNL

SEQ ID NO: 27501 - protein, 8 aa, Homo sapiens
  AACR GENIE Results; TP53_p.E258D; B3901
DDSSGNLL

SEQ ID NO: 27502 - protein, 10 aa, Homo sapiens
  AACR GENIE Results; TP53_p.E258D; A0201
TLDDSSGNLL

SEQ ID NO: 27503 - protein, 10 aa, Homo sapiens
  AACR GENIE Results; TP53_p.E258D; B1501
TLDDSSGNLL

SEQ ID NO: 27504 - protein, 10 aa, Homo sapiens
  AACR GENIE Results; TP53_p.E258D; A3303
DDSSGNLLGR

SEQ ID NO: 27505 - protein, 9 aa, Homo sapiens
  AACR GENIE Results; TP53_p.E258D; B3801
LDDSSGNLL

SEQ ID NO: 27506 - protein, 11 aa, Homo sapiens
  AACR GENIE Results; TP53_p.E258D; B5801
ITLDDSSGNLL

SEQ ID NO: 27507 - protein, 11 aa, Homo sapiens
  AACR GENIE Results; TP53_p.E258D; A0205
ITLDDSSGNLL

SEQ ID NO: 27508 - protein, 11 aa, Homo sapiens
  AACR GENIE Results; TP53_p.E258D; B2702
LDDSSGNLLGR

SEQ ID NO: 27509 - protein, 9 aa, Homo sapiens
  AACR GENIE Results; TP53_p.E258D; B3801
TLDDSSGNL

SEQ ID NO: 27510 - protein, 11 aa, Homo sapiens
  AACR GENIE Results; TP53_p.E258D; B5001
ITLDDSSGNLL

SEQ ID NO: 27511 - protein, 9 aa, Homo sapiens
  AACR GENIE Results; TP53_p.E258D; B3901
TLDDSSGNL

SEQ ID NO: 27512 - protein, 10 aa, Homo sapiens
  AACR GENIE Results; TP53_p.E258D; A0205
TLDDSSGNLL

SEQ ID NO: 27513 - protein, 10 aa, Homo sapiens
  AACR GENIE Results; TP53_p.E258D; B4001
TLDDSSGNLL

SEQ ID NO: 27514 - protein, 10 aa, Homo sapiens
  AACR GENIE Results; TP53_p.E258D; B2702
DDSSGNLLGR

SEQ ID NO: 27515 - protein, 11 aa, Homo sapiens
  AACR GENIE Results; TP53_p.E258D; B3801
ITLDDSSGNLL

SEQ ID NO: 27516 - protein, 9 aa, Homo sapiens
  AACR GENIE Results; TP53_p.E258D; A0201
TLDDSSGNL

SEQ ID NO: 27517 - protein, 9 aa, Homo sapiens
  AACR GENIE Results; TP53_p.E258D; C0802
LDDSSGNLL

SEQ ID NO: 27518 - protein, 8 aa, Homo sapiens
  AACR GENIE Results; TP53_p.E258K; B3701
KDSSGNLL

SEQ ID NO: 27519 - protein, 10 aa, Homo sapiens
  AACR GENIE Results; TP53_p.E258K; A3001
TLKDSSGNLL

SEQ ID NO: 27520 - protein, 10 aa, Homo sapiens
  AACR GENIE Results; TP53_p.E258K; B1501
TLKDSSGNLL

SEQ ID NO: 27521 - protein, 9 aa, Homo sapiens
  AACR GENIE Results; TP53_p.E258K; B0801
TLKDSSGNL

SEQ ID NO: 27522 - protein, 9 aa, Homo sapiens
  AACR GENIE Results; TP53_p.E258K; B1501
TLKDSSGNL

SEQ ID NO: 27523 - protein, 10 aa, Homo sapiens
  AACR GENIE Results; TP53_p.E258K; B5001
TLKDSSGNLL

SEQ ID NO: 27524 - protein, 8 aa, Homo sapiens
  AACR GENIE Results; TP53_p.E258K; B4002
KDSSGNLL

SEQ ID NO: 27525 - protein, 11 aa, Homo sapiens
  AACR GENIE Results; TP53_p.E258K; B5801
ITLKDSSGNLL

SEQ ID NO: 27526 - protein, 9 aa, Homo sapiens
  AACR GENIE Results; TP53_p.E271K; B2705
GRNSFKVRV

SEQ ID NO: 27527 - protein, 9 aa, Homo sapiens
  AACR GENIE Results; TP53_p.E271K; C0602
GRNSFKVRV

SEQ ID NO: 27528 - protein, 9 aa, Homo sapiens
  AACR GENIE Results; TP53_p.E271Q; C0602
GRNSFQVRV

SEQ ID NO: 27529 - protein, 9 aa, Homo sapiens
  AACR GENIE Results; TP53_p.E271V; B2705
GRNSFVVRV

SEQ ID NO: 27530 - protein, 9 aa, Homo sapiens
  AACR GENIE Results; TP53_p.E271V; C0602
GRNSFVVRV

SEQ ID NO: 27531 - protein, 11 aa, Homo sapiens
  AACR GENIE Results; TP53_p.E271V; A3301
NLLGRNSFVVR

SEQ ID NO: 27532 - protein, 8 aa, Homo sapiens
  AACR GENIE Results; TP53_p.E271V; B2705
GRNSFVVR

SEQ ID NO: 27533 - protein, 9 aa, Homo sapiens
  AACR GENIE Results; TP53_p.E271V; A3101
LGRNSFVVR

SEQ ID NO: 27534 - protein, 9 aa, Homo sapiens
  AACR GENIE Results; TP53_p.E271V; A3303
LGRNSFVVR

SEQ ID NO: 27535 - protein, 8 aa, Homo sapiens
  AACR GENIE Results; TP53_p.E271V; C1502
RNSFVVRV

SEQ ID NO: 27536 - protein, 11 aa, Homo sapiens
  AACR GENIE Results; TP53_p.E271V; A3101
NLLGRNSFVVR

SEQ ID NO: 27537 - protein, 10 aa, Homo sapiens
  AACR GENIE Results; TP53_p.E285K; A0301
RTKEENLRKK

SEQ ID NO: 27538 - protein, 9 aa, Homo sapiens
  AACR GENIE Results; TP53_p.E285K; A0301
RTKEENLRK

SEQ ID NO: 27539 - protein, 9 aa, Homo sapiens
  AACR GENIE Results; TP53_p.E285K; A1101
RTKEENLRK

SEQ ID NO: 27540 - protein, 9 aa, Homo sapiens
  AACR GENIE Results; TP53_p.E285V; A1101
RTVEENLRK

SEQ ID NO: 27541 - protein, 9 aa, Homo sapiens
  AACR GENIE Results; TP53_p.E285V; A0301
TVEENLRKK

SEQ ID NO: 27542 - protein, 10 aa, Homo sapiens
  AACR GENIE Results; TP53_p.E285V; A0301
RTVEENLRKK

SEQ ID NO: 27543 - protein, 9 aa, Homo sapiens
  AACR GENIE Results; TP53_p.E285V; A1101
TVEENLRKK

SEQ ID NO: 27544 - protein, 9 aa, Homo sapiens
  AACR GENIE Results; TP53_p.E285V; A0301
RTVEENLRK

SEQ ID NO: 27545 - protein, 10 aa, Homo sapiens
  AACR GENIE Results; TP53_p.E285V; A1101
RTVEENLRKK

SEQ ID NO: 27546 - protein, 10 aa, Homo sapiens
  AACR GENIE Results; TP53_p.E286K; A0301
RTEKENLRKK

SEQ ID NO: 27547 - protein, 9 aa, Homo sapiens
  AACR GENIE Results; TP53_p.E286K; B2705
RRTEKENLR

SEQ ID NO: 27548 - protein, 10 aa, Homo sapiens
  AACR GENIE Results; TP53_p.E286V; A0301
RTEVENLRKK

SEQ ID NO: 27549 - protein, 10 aa, Homo sapiens
  AACR GENIE Results; TP53_p.E286V; A1101
RTEVENLRKK

SEQ ID NO: 27550 - protein, 9 aa, Homo sapiens
  AACR GENIE Results; TP53_p.E286V; A1101
RTEVENLRK

SEQ ID NO: 27551 - protein, 9 aa, Homo sapiens
  AACR GENIE Results; TP53_p.E286V; A0301
RTEVENLRK

SEQ ID NO: 27552 - protein, 9 aa, Homo sapiens
  AACR GENIE Results; TP53_p.E294Sfs*51; A6801
TPAPLPSQR

SEQ ID NO: 27553 - protein, 10 aa, Homo sapiens
  AACR GENIE Results; TP53_p.E294Sfs*51; A6801
TTPAPLPSQR

SEQ ID NO: 27554 - protein, 10 aa, Homo sapiens
  AACR GENIE Results; TP53_p.E294Sfs*51; B0702
SPFRSVGVSA

SEQ ID NO: 27555 - protein, 9 aa, Homo sapiens
  AACR GENIE Results; TP53_p.E294Sfs*51; C0102
ISPFRSVGV

SEQ ID NO: 27556 - protein, 8 aa, Homo sapiens
  AACR GENIE Results; TP53_p.E294Sfs*51; B5101
SPFRSVGV

SEQ ID NO: 27557 - protein, 8 aa, Homo sapiens
  AACR GENIE Results; TP53_p.E294Sfs*51; B0702
SPFRSVGV

SEQ ID NO: 27558 - protein, 9 aa, Homo sapiens
  AACR GENIE Results; TP53_p.E294Sfs*51; A6801
RSVGVSASR

SEQ ID NO: 27559 - protein, 9 aa, Homo sapiens
  AACR GENIE Results; TP53_p.E294Sfs*51; B5701
RSVGVSASR

SEQ ID NO: 27560 - protein, 8 aa, Homo sapiens
  AACR GENIE Results; TP53_p.E294Sfs*51; B0801
SPFRSVGV

SEQ ID NO: 27561 - protein, 9 aa, Homo sapiens
  AACR GENIE Results; TP53_p.E294Sfs*51; A1101
RSVGVSASR

SEQ ID NO: 27562 - protein, 9 aa, Homo sapiens
  AACR GENIE Results; TP53_p.E294Sfs*51; A0301
RSVGVSASR

SEQ ID NO: 27563 - protein, 10 aa, Homo sapiens
  AACR GENIE Results; TP53_p.E294Sfs*51; A6801
TPAPLPSQRR

SEQ ID NO: 27564 - protein, 9 aa, Homo sapiens
  AACR GENIE Results; TP53_p.E56Kfs*67; C0303
SCILGQPSL

SEQ ID NO: 27565 - protein, 9 aa, Homo sapiens
  AACR GENIE Results; TP53_p.E56Kfs*67; C0304
SCILGQPSL

SEQ ID NO: 27566 - protein, 9 aa, Homo sapiens
  AACR GENIE Results; TP53_p.E56Kfs*67; B1501
SCILGQPSL

SEQ ID NO: 27567 - protein, 9 aa, Homo sapiens
  AACR GENIE Results; TP53_p.E56Kfs*67; B0702
LPRKPTRAA

SEQ ID NO: 27568 - protein, 9 aa, Homo sapiens
  AACR GENIE Results; TP53_p.E56Kfs*67; B0702
SCILGQPSL

SEQ ID NO: 27569 - protein, 8 aa, Homo sapiens
  AACR GENIE Results; TP53_p.E56Kfs*67; C1203
FTKTQVQM

SEQ ID NO: 27570 - protein, 8 aa, Homo sapiens
  AACR GENIE Results; TP53_p.E56Kfs*67; B0801
FTKTQVQM

SEQ ID NO: 27571 - protein, 10 aa, Homo sapiens
  AACR GENIE Results; TP53_p.E56Kfs*67; A1101
ASCILGQPSL

SEQ ID NO: 27572 - protein, 9 aa, Homo sapiens
  AACR GENIE Results; TP53_p.E56Kfs*67; A0201
SCILGQPSL

SEQ ID NO: 27573 - protein, 9 aa, Homo sapiens
  AACR GENIE Results; TP53_p.E56Kfs*67; C1601
SCILGQPSL

SEQ ID NO: 27574 - protein, 9 aa, Homo sapiens
  AACR GENIE Results; TP53_p.E56Kfs*67; B0801
SCILGQPSL

SEQ ID NO: 27575 - protein, 8 aa, Homo sapiens
  AACR GENIE Results; TP53_p.E56Kfs*67; C1601
FTKTQVQM

SEQ ID NO: 27576 - protein, 11 aa, Homo sapiens
  AACR GENIE Results; TP53_p.E56Kfs*67; B0702
LPRKPTRAATV

SEQ ID NO: 27577 - protein, 8 aa, Homo sapiens
  AACR GENIE Results; TP53_p.E56Kfs*67; B1501
FTKTQVQM

SEQ ID NO: 27578 - protein, 9 aa, Homo sapiens
  AACR GENIE Results; TP53_p.E56Kfs*67; B4001
SCILGQPSL

SEQ ID NO: 27579 - protein, 9 aa, Homo sapiens
  AACR GENIE Results; TP53_p.E56Kfs*67; B3501
SCILGQPSL

SEQ ID NO: 27580 - protein, 9 aa, Homo sapiens
  AACR GENIE Results; TP53_p.F113V; A1101
GVLHSGTAK

SEQ ID NO: 27581 - protein, 9 aa, Homo sapiens
  AACR GENIE Results; TP53_p.F113V; A0301
GVLHSGTAK

SEQ ID NO: 27582 - protein, 8 aa, Homo sapiens
  AACR GENIE Results; TP53_p.F113V; A0301
VLHSGTAK

SEQ ID NO: 27583 - protein, 9 aa, Homo sapiens
  AACR GENIE Results; TP53_p.F113V; C1502
GSYGFRLGV

SEQ ID NO: 27584 - protein, 9 aa, Homo sapiens
  AACR GENIE Results; TP53_p.F113V; B1302
GSYGFRLGV

SEQ ID NO: 27585 - protein, 9 aa, Homo sapiens
  AACR GENIE Results; TP53_p.F113V; C1402
SYGFRLGVL

SEQ ID NO: 27586 - protein, 8 aa, Homo sapiens
  AACR GENIE Results; TP53_p.F113V; A1101
VLHSGTAK

SEQ ID NO: 27587 - protein, 11 aa, Homo sapiens
  AACR GENIE Results; TP53_p.F113V; A0301
RLGVLHSGTAK

SEQ ID NO: 27588 - protein, 9 aa, Homo sapiens
  AACR GENIE Results; TP53_p.F134C; B0702
SPALNKMCC

SEQ ID NO: 27589 - protein, 8 aa, Homo sapiens
  AACR GENIE Results; TP53_p.F134L; B0702
SPALNKML

SEQ ID NO: 27590 - protein, 10 aa, Homo sapiens
  AACR GENIE Results; TP53_p.F134L; A2301
TYSPALNKML

SEQ ID NO: 27591 - protein, 10 aa, Homo sapiens
  AACR GENIE Results; TP53_p.F134L; A2402
TYSPALNKML

SEQ ID NO: 27592 - protein, 9 aa, Homo sapiens
  AACR GENIE Results; TP53_p.F134L; C0102
YSPALNKML

SEQ ID NO: 27593 - protein, 8 aa, Homo sapiens
  AACR GENIE Results; TP53_p.F134L; B0801
SPALNKML

SEQ ID NO: 27594 - protein, 11 aa, Homo sapiens
  AACR GENIE Results; TP53_p.F134L; B0702
SPALNKMLCQL

SEQ ID NO: 27595 - protein, 9 aa, Homo sapiens
  AACR GENIE Results; TP53_p.F134L; B0702
SPALNKMLC

SEQ ID NO: 27596 - protein, 9 aa, Homo sapiens
  AACR GENIE Results; TP53_p.F212Sfs*3; A0201
YLDDRNTST

SEQ ID NO: 27597 - protein, 9 aa, Homo sapiens
  AACR GENIE Results; TP53_p.F212Sfs*3; C0802
YLDDRNTST

SEQ ID NO: 27598 - protein, 9 aa, Homo sapiens
  AACR GENIE Results; TP53_p.F212Sfs*3; C0501
YLDDRNTST

SEQ ID NO: 27599 - protein, 9 aa, Homo sapiens
  AACR GENIE Results; TP53_p.F212Sfs*3; B0801
YLDDRNTST

SEQ ID NO: 27600 - protein, 9 aa, Homo sapiens
  AACR GENIE Results; TP53_p.F212Sfs*3; A0101
YLDDRNTST

SEQ ID NO: 27601 - protein, 9 aa, Homo sapiens
  AACR GENIE Results; TP53_p.F270L; B2705
GRNSLEVRV

SEQ ID NO: 27602 - protein, 9 aa, Homo sapiens
  AACR GENIE Results; TP53_p.F270L; C0602
GRNSLEVRV

SEQ ID NO: 27603 - protein, 8 aa, Homo sapiens
  AACR GENIE Results; TP53_p.F270L; B0801
NLLGRNSL

SEQ ID NO: 27604 - protein, 10 aa, Homo sapiens
  AACR GENIE Results; TP53_p.F270L; B0702
SGNLLGRNSL

SEQ ID NO: 27605 - protein, 9 aa, Homo sapiens
  AACR GENIE Results; TP53_p.F270V; C0602
GRNSVEVRV

SEQ ID NO: 27606 - protein, 11 aa, Homo sapiens
  AACR GENIE Results; TP53_p.F270V; A0201
GNLLGRNSVEV

SEQ ID NO: 27607 - protein, 8 aa, Homo sapiens
  AACR GENIE Results; TP53_p.F270V; C1203
NSVEVRVC

SEQ ID NO: 27608 - protein, 10 aa, Homo sapiens
  AACR GENIE Results; TP53_p.F328Sfs*17; B0702
SPFRSVGVSA

SEQ ID NO: 27609 - protein, 9 aa, Homo sapiens
  AACR GENIE Results; TP53_p.F328Sfs*17; C0102
YSPFRSVGV

SEQ ID NO: 27610 - protein, 9 aa, Homo sapiens
  AACR GENIE Results; TP53_p.F328Sfs*17; B4403
GEYSPFRSV

SEQ ID NO: 27611 - protein, 8 aa, Homo sapiens
  AACR GENIE Results; TP53_p.F328Sfs*17; B5101
SPFRSVGV

SEQ ID NO: 27612 - protein, 8 aa, Homo sapiens
  AACR GENIE Results; TP53_p.F328Sfs*17; B0702
SPFRSVGV

SEQ ID NO: 27613 - protein, 9 aa, Homo sapiens
  AACR GENIE Results; TP53_p.F328Sfs*17; B4001
GEYSPFRSV

SEQ ID NO: 27614 - protein, 8 aa, Homo sapiens
  AACR GENIE Results; TP53_p.F328Sfs*17; B0801
SPFRSVGV

SEQ ID NO: 27615 - protein, 9 aa, Homo sapiens
  AACR GENIE Results; TP53_p.F328Sfs*17; A1101
RSVGVSASR

SEQ ID NO: 27616 - protein, 9 aa, Homo sapiens
  AACR GENIE Results; TP53_p.F328Sfs*17; A0301
RSVGVSASR

SEQ ID NO: 27617 - protein, 9 aa, Homo sapiens
  AACR GENIE Results; TP53_p.F328Sfs*17; B0702
GEYSPFRSV

SEQ ID NO: 27618 - protein, 10 aa, Homo sapiens
  AACR GENIE Results; TP53_p.F328Sfs*17; B3501
KPLDGEYSPF

SEQ ID NO: 27619 - protein, 9 aa, Homo sapiens
  AACR GENIE Results; TP53_p.F328Sfs*17; B1801
GEYSPFRSV

SEQ ID NO: 27620 - protein, 10 aa, Homo sapiens
  AACR GENIE Results; TP53_p.F328Sfs*17; B0702
KPLDGEYSPF

SEQ ID NO: 27621 - protein, 9 aa, Homo sapiens
  AACR GENIE Results; TP53_p.G105C; B1501
SQKTYQCSY

SEQ ID NO: 27622 - protein, 9 aa, Homo sapiens
  AACR GENIE Results; TP53_p.G105C; B0801
VPSQKTYQC

SEQ ID NO: 27623 - protein, 9 aa, Homo sapiens
  AACR GENIE Results; TP53_p.G105C; A2902
CSYGFRLGF

SEQ ID NO: 27624 - protein, 9 aa, Homo sapiens
  AACR GENIE Results; TP53_p.G105C; B0702
VPSQKTYQC

SEQ ID NO: 27625 - protein, 9 aa, Homo sapiens
  AACR GENIE Results; TP53_p.G105C; B5701
CSYGFRLGF

SEQ ID NO: 27626 - protein, 9 aa, Homo sapiens
  AACR GENIE Results; TP53_p.G105C; B5701
KTYQCSYGF

SEQ ID NO: 27627 - protein, 9 aa, Homo sapiens
  AACR GENIE Results; TP53_p.G105D; B1501
SQKTYQDSY

SEQ ID NO: 27628 - protein, 11 aa, Homo sapiens
  AACR GENIE Results; TP53_p.G105D; B3501
VPSQKTYQDSY

SEQ ID NO: 27629 - protein, 11 aa, Homo sapiens
  AACR GENIE Results; TP53_p.G105D; A0301
KTYQDSYGFRL

SEQ ID NO: 27630 - protein, 10 aa, Homo sapiens
  AACR GENIE Results; TP53_p.G105D; A2402
TYQDSYGFRL

SEQ ID NO: 27631 - protein, 8 aa, Homo sapiens
  AACR GENIE Results; TP53_p.G105D; A2402
TYQDSYGF

SEQ ID NO: 27632 - protein, 9 aa, Homo sapiens
  AACR GENIE Results; TP53_p.G105D; C0501
YQDSYGFRL

SEQ ID NO: 27633 - protein, 9 aa, Homo sapiens
  AACR GENIE Results; TP53_p.G105D; B1501
KTYQDSYGF

SEQ ID NO: 27634 - protein, 10 aa, Homo sapiens
  AACR GENIE Results; TP53_p.G105D; A0301
KTYQDSYGFR

SEQ ID NO: 27635 - protein, 9 aa, Homo sapiens
  AACR GENIE Results; TP53_p.G105S; B1501
SQKTYQSSY

SEQ ID NO: 27636 - protein, 9 aa, Homo sapiens
  AACR GENIE Results; TP53_p.G105S; A3002
SQKTYQSSY

SEQ ID NO: 27637 - protein, 9 aa, Homo sapiens
  AACR GENIE Results; TP53_p.G105S; B5701
KTYQSSYGF

SEQ ID NO: 27638 - protein, 9 aa, Homo sapiens
  AACR GENIE Results; TP53_p.G105S; B5801
KTYQSSYGF

SEQ ID NO: 27639 - protein, 8 aa, Homo sapiens
  AACR GENIE Results; TP53_p.G105S; A2301
TYQSSYGF

SEQ ID NO: 27640 - protein, 9 aa, Homo sapiens
  AACR GENIE Results; TP53_p.G105S; A3201
KTYQSSYGF

SEQ ID NO: 27641 - protein, 11 aa, Homo sapiens
  AACR GENIE Results; TP53_p.G105S; B0702
VPSQKTYQSSY

SEQ ID NO: 27642 - protein, 9 aa, Homo sapiens
  AACR GENIE Results; TP53_p.G105S; A0301
SSYGFRLGF

SEQ ID NO: 27643 - protein, 8 aa, Homo sapiens
  AACR GENIE Results; TP53_p.G105S; A2402
TYQSSYGF

SEQ ID NO: 27644 - protein, 9 aa, Homo sapiens
  AACR GENIE Results; TP53_p.G105S; A2902
SSYGFRLGF

SEQ ID NO: 27645 - protein, 11 aa, Homo sapiens
  AACR GENIE Results; TP53_p.G105S; B3501
VPSQKTYQSSY

SEQ ID NO: 27646 - protein, 9 aa, Homo sapiens
  AACR GENIE Results; TP53_p.G105S; A3303
TYQSSYGFR

SEQ ID NO: 27647 - protein, 11 aa, Homo sapiens
  AACR GENIE Results; TP53_p.G105S; A0301
KTYQSSYGFRL

SEQ ID NO: 27648 - protein, 10 aa, Homo sapiens
  AACR GENIE Results; TP53_p.G105S; A2301
TYQSSYGFRL

SEQ ID NO: 27649 - protein, 9 aa, Homo sapiens
  AACR GENIE Results; TP53_p.G105S; B5701
SSYGFRLGF

SEQ ID NO: 27650 - protein, 8 aa, Homo sapiens
  AACR GENIE Results; TP53_p.G105S; C1402
TYQSSYGF

SEQ ID NO: 27651 - protein, 9 aa, Homo sapiens
  AACR GENIE Results; TP53_p.G105S; A1101
SSYGFRLGF

SEQ ID NO: 27652 - protein, 9 aa, Homo sapiens
  AACR GENIE Results; TP53_p.G105S; C0202
SQKTYQSSY

SEQ ID NO: 27653 - protein, 9 aa, Homo sapiens
  AACR GENIE Results; TP53_p.G105S; B1501
KTYQSSYGF

SEQ ID NO: 27654 - protein, 10 aa, Homo sapiens
  AACR GENIE Results; TP53_p.G105S; A2402
TYQSSYGFRL

SEQ ID NO: 27655 - protein, 9 aa, Homo sapiens
  AACR GENIE Results; TP53_p.G105S; A3201
SQKTYQSSY

SEQ ID NO: 27656 - protein, 9 aa, Homo sapiens
  AACR GENIE Results; TP53_p.G105S; A2601
SQKTYQSSY

SEQ ID NO: 27657 - protein, 10 aa, Homo sapiens
  AACR GENIE Results; TP53_p.G105S; A3101
KTYQSSYGFR

SEQ ID NO: 27658 - protein, 9 aa, Homo sapiens
  AACR GENIE Results; TP53_p.G105S; A3101
TYQSSYGFR

SEQ ID NO: 27659 - protein, 8 aa, Homo sapiens
  AACR GENIE Results; TP53_p.G105S; B3901
TYQSSYGF

SEQ ID NO: 27660 - protein, 10 aa, Homo sapiens
  AACR GENIE Results; TP53_p.G105S; A0301
KTYQSSYGFR

SEQ ID NO: 27661 - protein, 9 aa, Homo sapiens
  AACR GENIE Results; TP53_p.G105S; C1601
SSYGFRLGF

SEQ ID NO: 27662 - protein, 9 aa, Homo sapiens
  AACR GENIE Results; TP53_p.G105S; A3002
KTYQSSYGF

SEQ ID NO: 27663 - protein, 9 aa, Homo sapiens
  AACR GENIE Results; TP53_p.G105V; B1501
SQKTYQVSY

SEQ ID NO: 27664 - protein, 9 aa, Homo sapiens
  AACR GENIE Results; TP53_p.G105V; B0801
VPSQKTYQV

SEQ ID NO: 27665 - protein, 9 aa, Homo sapiens
  AACR GENIE Results; TP53_p.G105V; B0702
VPSQKTYQV

SEQ ID NO: 27666 - protein, 11 aa, Homo sapiens
  AACR GENIE Results; TP53_p.G105V; B3501
VPSQKTYQVSY

SEQ ID NO: 27667 - protein, 9 aa, Homo sapiens
  AACR GENIE Results; TP53_p.G105V; B5101
VPSQKTYQV

SEQ ID NO: 27668 - protein, 8 aa, Homo sapiens
  AACR GENIE Results; TP53_p.G105V; A2402
TYQVSYGF

SEQ ID NO: 27669 - protein, 9 aa, Homo sapiens
  AACR GENIE Results; TP53_p.G105V; A3201
SQKTYQVSY

SEQ ID NO: 27670 - protein, 9 aa, Homo sapiens
  AACR GENIE Results; TP53_p.G105V; C0202
SQKTYQVSY

SEQ ID NO: 27671 - protein, 11 aa, Homo sapiens
  AACR GENIE Results; TP53_p.G105V; B0702
VPSQKTYQVSY

SEQ ID NO: 27672 - protein, 11 aa, Homo sapiens
  AACR GENIE Results; TP53_p.G105V; A0301
KTYQVSYGFRL

SEQ ID NO: 27673 - protein, 9 aa, Homo sapiens
  AACR GENIE Results; TP53_p.G105V; A3201
KTYQVSYGF

SEQ ID NO: 27674 - protein, 9 aa, Homo sapiens
  AACR GENIE Results; TP53_p.G105V; B0801
SQKTYQVSY

SEQ ID NO: 27675 - protein, 9 aa, Homo sapiens
  AACR GENIE Results; TP53_p.G105V; C1203
SQKTYQVSY

SEQ ID NO: 27676 - protein, 10 aa, Homo sapiens
  AACR GENIE Results; TP53_p.G105V; A0301
KTYQVSYGFR

SEQ ID NO: 27677 - protein, 9 aa, Homo sapiens
  AACR GENIE Results; TP53_p.G105V; C1601
VSYGFRLGF

SEQ ID NO: 27678 - protein, 9 aa, Homo sapiens
  AACR GENIE Results; TP53_p.G108S; B5701
KTYQGSYSF

SEQ ID NO: 27679 - protein, 9 aa, Homo sapiens
  AACR GENIE Results; TP53_p.G108S; A3201
KTYQGSYSF

SEQ ID NO: 27680 - protein, 9 aa, Homo sapiens
  AACR GENIE Results; TP53_p.G108S; A3303
TYQGSYSFR

SEQ ID NO: 27681 - protein, 10 aa, Homo sapiens
  AACR GENIE Results; TP53_p.G108S; A0301
KTYQGSYSFR

SEQ ID NO: 27682 - protein, 10 aa, Homo sapiens
  AACR GENIE Results; TP53_p.G108S; A3101
KTYQGSYSFR

SEQ ID NO: 27683 - protein, 8 aa, Homo sapiens
  AACR GENIE Results; TP53_p.G108S; A2301
TYQGSYSF

SEQ ID NO: 27684 - protein, 9 aa, Homo sapiens
  AACR GENIE Results; TP53_p.G108S; A3101
TYQGSYSFR

SEQ ID NO: 27685 - protein, 9 aa, Homo sapiens
  AACR GENIE Results; TP53_p.G108S; B1501
KTYQGSYSF

SEQ ID NO: 27686 - protein, 8 aa, Homo sapiens
  AACR GENIE Results; TP53_p.G108S; C1402
TYQGSYSF

SEQ ID NO: 27687 - protein, 8 aa, Homo sapiens
  AACR GENIE Results; TP53_p.G108S; A2402
TYQGSYSF

SEQ ID NO: 27688 - protein, 9 aa, Homo sapiens
  AACR GENIE Results; TP53_p.G108S; A0301
KTYQGSYSF

SEQ ID NO: 27689 - protein, 11 aa, Homo sapiens
  AACR GENIE Results; TP53_p.G108S; A0301
KTYQGSYSFRL

SEQ ID NO: 27690 - protein, 9 aa, Homo sapiens
  AACR GENIE Results; TP53_p.G108S; A2301
KTYQGSYSF

SEQ ID NO: 27691 - protein, 8 aa, Homo sapiens
  AACR GENIE Results; TP53_p.G108S; C1402
SYSFRLGF

SEQ ID NO: 27692 - protein, 9 aa, Homo sapiens
  AACR GENIE Results; TP53_p.G108S; B5701
GSYSFRLGF

SEQ ID NO: 27693 - protein, 9 aa, Homo sapiens
  AACR GENIE Results; TP53_p.G108S; A1101
KTYQGSYSF

SEQ ID NO: 27694 - protein, 9 aa, Homo sapiens
  AACR GENIE Results; TP53_p.G108S; A2902
GSYSFRLGF

SEQ ID NO: 27695 - protein, 9 aa, Homo sapiens
  AACR GENIE Results; TP53_p.G108S; A3001
KTYQGSYSF

SEQ ID NO: 27696 - protein, 9 aa, Homo sapiens
  AACR GENIE Results; TP53_p.G108S; A0301
GSYSFRLGF

SEQ ID NO: 27697 - protein, 10 aa, Homo sapiens
  AACR GENIE Results; TP53_p.G108S; A1101
KTYQGSYSFR

SEQ ID NO: 27698 - protein, 9 aa, Homo sapiens
  AACR GENIE Results; TP53_p.G108S; C0701
KTYQGSYSF

SEQ ID NO: 27699 - protein, 9 aa, Homo sapiens
  AACR GENIE Results; TP53_p.G108S; A2402
KTYQGSYSF

SEQ ID NO: 27700 - protein, 8 aa, Homo sapiens
  AACR GENIE Results; TP53_p.G108S; B3901
TYQGSYSF

SEQ ID NO: 27701 - protein, 11 aa, Homo sapiens
  AACR GENIE Results; TP53_p.G108S; B5701
KTYQGSYSFRL

SEQ ID NO: 27702 - protein, 9 aa, Homo sapiens
  AACR GENIE Results; TP53_p.G108S; C1601
KTYQGSYSF

SEQ ID NO: 27703 - protein, 9 aa, Homo sapiens
  AACR GENIE Results; TP53_p.G108S; A3101
KTYQGSYSF

SEQ ID NO: 27704 - protein, 9 aa, Homo sapiens
  AACR GENIE Results; TP53_p.G108S; C1203
KTYQGSYSF

SEQ ID NO: 27705 - protein, 9 aa, Homo sapiens
  AACR GENIE Results; TP53_p.G108S; A2902
KTYQGSYSF

SEQ ID NO: 27706 - protein, 9 aa, Homo sapiens
  AACR GENIE Results; TP53_p.G108S; C1402
SYSFRLGFL

SEQ ID NO: 27707 - protein, 9 aa, Homo sapiens
  AACR GENIE Results; TP53_p.G108S; B0702
KTYQGSYSF

SEQ ID NO: 27708 - protein, 11 aa, Homo sapiens
  AACR GENIE Results; TP53_p.G108S; B1501
SQKTYQGSYSF

SEQ ID NO: 27709 - protein, 9 aa, Homo sapiens
  AACR GENIE Results; TP53_p.G108S; C0202
KTYQGSYSF

SEQ ID NO: 27710 - protein, 10 aa, Homo sapiens
  AACR GENIE Results; TP53_p.G108S; A2301
TYQGSYSFRL

SEQ ID NO: 27711 - protein, 9 aa, Homo sapiens
  AACR GENIE Results; TP53_p.G154Afs*16; B0702
APWPSTSSH

SEQ ID NO: 27712 - protein, 9 aa, Homo sapiens
  AACR GENIE Results; TP53_p.G154Afs*16; B3501
APWPSTSSH

SEQ ID NO: 27713 - protein, 11 aa, Homo sapiens
  AACR GENIE Results; TP53_p.G154Afs*16; B3501
TPPPAPASAPW

SEQ ID NO: 27714 - protein, 11 aa, Homo sapiens
  AACR GENIE Results; TP53_p.G154Afs*16; B3501
APWPSTSSHST

SEQ ID NO: 27715 - protein, 10 aa, Homo sapiens
  AACR GENIE Results; TP53_p.G154Afs*16; A0201
STPPPAPASA

SEQ ID NO: 27716 - protein, 9 aa, Homo sapiens
  AACR GENIE Results; TP53_p.G154V; A6801
DSTPPPVTR

SEQ ID NO: 27717 - protein, 9 aa, Homo sapiens
  AACR GENIE Results; TP53_p.G154V; A3301
DSTPPPVTR

SEQ ID NO: 27718 - protein, 8 aa, Homo sapiens
  AACR GENIE Results; TP53_p.G154V; B5101
TPPPVTRV

SEQ ID NO: 27719 - protein, 9 aa, Homo sapiens
  AACR GENIE Results; TP53_p.G154V; A3303
DSTPPPVTR

SEQ ID NO: 27720 - protein, 9 aa, Homo sapiens
  AACR GENIE Results; TP53_p.G154V; A6802
STPPPVTRV

SEQ ID NO: 27721 - protein, 10 aa, Homo sapiens
  AACR GENIE Results; TP53_p.G154V; A6801
VDSTPPPVTR

SEQ ID NO: 27722 - protein, 9 aa, Homo sapiens
  AACR GENIE Results; TP53_p.G154V; A0205
STPPPVTRV

SEQ ID NO: 27723 - protein, 10 aa, Homo sapiens
  AACR GENIE Results; TP53_p.G154V; A3303
VDSTPPPVTR

SEQ ID NO: 27724 - protein, 10 aa, Homo sapiens
  AACR GENIE Results; TP53_p.G154V; A6802
VDSTPPPVTR

SEQ ID NO: 27725 - protein, 10 aa, Homo sapiens
  AACR GENIE Results; TP53_p.G154V; A3301
VDSTPPPVTR

SEQ ID NO: 27726 - protein, 10 aa, Homo sapiens
  AACR GENIE Results; TP53_p.G154V; A6802
DSTPPPVTRV

SEQ ID NO: 27727 - protein, 9 aa, Homo sapiens
  AACR GENIE Results; TP53_p.G154V; A0201
STPPPVTRV

SEQ ID NO: 27728 - protein, 9 aa, Homo sapiens
  AACR GENIE Results; TP53_p.G154V; A3303
TPPPVTRVR

SEQ ID NO: 27729 - protein, 9 aa, Homo sapiens
  AACR GENIE Results; TP53_p.G154V; A6801
TPPPVTRVR

SEQ ID NO: 27730 - protein, 11 aa, Homo sapiens
  AACR GENIE Results; TP53_p.G154V; A6801
DSTPPPVTRVR

SEQ ID NO: 27731 - protein, 10 aa, Homo sapiens
  AACR GENIE Results; TP53_p.G154V; A1101
STPPPVTRVR

SEQ ID NO: 27732 - protein, 8 aa, Homo sapiens
  AACR GENIE Results; TP53_p.G154V; A3303
STPPPVTR

SEQ ID NO: 27733 - protein, 8 aa, Homo sapiens
  AACR GENIE Results; TP53_p.G154V; B3701
VDSTPPPV

SEQ ID NO: 27734 - protein, 8 aa, Homo sapiens
  AACR GENIE Results; TP53_p.G154V; A3101
STPPPVTR

SEQ ID NO: 27735 - protein, 9 aa, Homo sapiens
  AACR GENIE Results; TP53_p.G154V; A1101
STPPPVTRV

SEQ ID NO: 27736 - protein, 10 aa, Homo sapiens
  AACR GENIE Results; TP53_p.G154V; A6801
STPPPVTRVR

SEQ ID NO: 27737 - protein, 9 aa, Homo sapiens
  AACR GENIE Results; TP53_p.G154V; C1502
STPPPVTRV

SEQ ID NO: 27738 - protein, 9 aa, Homo sapiens
  AACR GENIE Results; TP53_p.G154V; A6801
STPPPVTRV

SEQ ID NO: 27739 - protein, 10 aa, Homo sapiens
  AACR GENIE Results; TP53_p.G154V; B2702
VDSTPPPVTR

SEQ ID NO: 27740 - protein, 10 aa, Homo sapiens
  AACR GENIE Results; TP53_p.G154V; A1101
VDSTPPPVTR

SEQ ID NO: 27741 - protein, 8 aa, Homo sapiens
  AACR GENIE Results; TP53_p.G154V; A1101
STPPPVTR

SEQ ID NO: 27742 - protein, 9 aa, Homo sapiens
  AACR GENIE Results; TP53_p.G154V; A6802
DSTPPPVTR

SEQ ID NO: 27743 - protein, 9 aa, Homo sapiens
  AACR GENIE Results; TP53_p.G154V; A3001
VDSTPPPVT

SEQ ID NO: 27744 - protein, 10 aa, Homo sapiens
  AACR GENIE Results; TP53_p.G154V; A3101
VDSTPPPVTR

SEQ ID NO: 27745 - protein, 8 aa, Homo sapiens
  AACR GENIE Results; TP53_p.G154V; B4002
VDSTPPPV

SEQ ID NO: 27746 - protein, 10 aa, Homo sapiens
  AACR GENIE Results; TP53_p.G154V; A3303
STPPPVTRVR

SEQ ID NO: 27747 - protein, 9 aa, Homo sapiens
  AACR GENIE Results; TP53_p.G154V; A0201
WVDSTPPPV

SEQ ID NO: 27748 - protein, 10 aa, Homo sapiens
  AACR GENIE Results; TP53_p.G154V; A3101
STPPPVTRVR

SEQ ID NO: 27749 - protein, 9 aa, Homo sapiens
  AACR GENIE Results; TP53_p.G154V; A2601
STPPPVTRV

SEQ ID NO: 27750 - protein, 8 aa, Homo sapiens
  AACR GENIE Results; TP53_p.G154V; A6801
STPPPVTR

SEQ ID NO: 27751 - protein, 9 aa, Homo sapiens
  AACR GENIE Results; TP53_p.G154V; C0102
STPPPVTRV

SEQ ID NO: 27752 - protein, 9 aa, Homo sapiens
  AACR GENIE Results; TP53_p.G154V; B5701
DSTPPPVTR

SEQ ID NO: 27753 - protein, 9 aa, Homo sapiens
  AACR GENIE Results; TP53_p.G154V; A3101
DSTPPPVTR

SEQ ID NO: 27754 - protein, 9 aa, Homo sapiens
  AACR GENIE Results; TP53_p.G199E; B1801
VEENLRVEY

SEQ ID NO: 27755 - protein, 9 aa, Homo sapiens
  AACR GENIE Results; TP53_p.G199E; B4403
VEENLRVEY

SEQ ID NO: 27756 - protein, 8 aa, Homo sapiens
  AACR GENIE Results; TP53_p.G199E; B1801
EENLRVEY

SEQ ID NO: 27757 - protein, 9 aa, Homo sapiens
  AACR GENIE Results; TP53_p.G199E; B4402
VEENLRVEY

SEQ ID NO: 27758 - protein, 10 aa, Homo sapiens
  AACR GENIE Results; TP53_p.G199E; B4001
VEENLRVEYL

SEQ ID NO: 27759 - protein, 8 aa, Homo sapiens
  AACR GENIE Results; TP53_p.G199E; B4403
EENLRVEY

SEQ ID NO: 27760 - protein, 9 aa, Homo sapiens
  AACR GENIE Results; TP53_p.G199E; A2301
VEENLRVEY

SEQ ID NO: 27761 - protein, 10 aa, Homo sapiens
  AACR GENIE Results; TP53_p.G199E; B5701
RVEENLRVEY

SEQ ID NO: 27762 - protein, 9 aa, Homo sapiens
  AACR GENIE Results; TP53_p.G199E; B4403
EENLRVEYL

SEQ ID NO: 27763 - protein, 9 aa, Homo sapiens
  AACR GENIE Results; TP53_p.G199E; B4402
EENLRVEYL

SEQ ID NO: 27764 - protein, 10 aa, Homo sapiens
  AACR GENIE Results; TP53_p.G199E; B1501
RVEENLRVEY

SEQ ID NO: 27765 - protein, 8 aa, Homo sapiens
  AACR GENIE Results; TP53_p.G199E; B4402
EENLRVEY

SEQ ID NO: 27766 - protein, 9 aa, Homo sapiens
  AACR GENIE Results; TP53_p.G199E; B4001
VEENLRVEY

SEQ ID NO: 27767 - protein, 9 aa, Homo sapiens
  AACR GENIE Results; TP53_p.G199E; B1501
VEENLRVEY

SEQ ID NO: 27768 - protein, 8 aa, Homo sapiens
  AACR GENIE Results; TP53_p.G199E; B0801
EENLRVEY

SEQ ID NO: 27769 - protein, 9 aa, Homo sapiens
  AACR GENIE Results; TP53_p.G199E; B4001
EENLRVEYL

SEQ ID NO: 27770 - protein, 10 aa, Homo sapiens
  AACR GENIE Results; TP53_p.G199E; A0101
RVEENLRVEY

SEQ ID NO: 27771 - protein, 8 aa, Homo sapiens
  AACR GENIE Results; TP53_p.G199E; A2301
EENLRVEY

SEQ ID NO: 27772 - protein, 9 aa, Homo sapiens
  AACR GENIE Results; TP53_p.G199E; A2301
EENLRVEYL

SEQ ID NO: 27773 - protein, 9 aa, Homo sapiens
  AACR GENIE Results; TP53_p.G199E; B3501
VEENLRVEY

SEQ ID NO: 27774 - protein, 10 aa, Homo sapiens
  AACR GENIE Results; TP53_p.G199E; B3501
RVEENLRVEY

SEQ ID NO: 27775 - protein, 9 aa, Homo sapiens
  AACR GENIE Results; TP53_p.G199E; B1801
EENLRVEYL

SEQ ID NO: 27776 - protein, 9 aa, Homo sapiens
  AACR GENIE Results; TP53_p.G199V; B1801
VEVNLRVEY

SEQ ID NO: 27777 - protein, 9 aa, Homo sapiens
  AACR GENIE Results; TP53_p.G199V; B4403
VEVNLRVEY

SEQ ID NO: 27778 - protein, 9 aa, Homo sapiens
  AACR GENIE Results; TP53_p.G199V; B4402
VEVNLRVEY

SEQ ID NO: 27779 - protein, 9 aa, Homo sapiens
  AACR GENIE Results; TP53_p.G199V; A2301
VEVNLRVEY

SEQ ID NO: 27780 - protein, 9 aa, Homo sapiens
  AACR GENIE Results; TP53_p.G199V; B1501
VEVNLRVEY

SEQ ID NO: 27781 - protein, 10 aa, Homo sapiens
  AACR GENIE Results; TP53_p.G199V; B4001
VEVNLRVEYL

SEQ ID NO: 27782 - protein, 9 aa, Homo sapiens
  AACR GENIE Results; TP53_p.G199V; B0801
EVNLRVEYL

SEQ ID NO: 27783 - protein, 10 aa, Homo sapiens
  AACR GENIE Results; TP53_p.G199V; B5701
RVEVNLRVEY

SEQ ID NO: 27784 - protein, 9 aa, Homo sapiens
  AACR GENIE Results; TP53_p.G199V; B3501
VEVNLRVEY

SEQ ID NO: 27785 - protein, 9 aa, Homo sapiens
  AACR GENIE Results; TP53_p.G199V; B4001
VEVNLRVEY

SEQ ID NO: 27786 - protein, 9 aa, Homo sapiens
  AACR GENIE Results; TP53_p.G199V; A3001
VEVNLRVEY

SEQ ID NO: 27787 - protein, 8 aa, Homo sapiens
  AACR GENIE Results; TP53_p.G199V; A2601
EVNLRVEY

SEQ ID NO: 27788 - protein, 9 aa, Homo sapiens
  AACR GENIE Results; TP53_p.G199V; B1402
EVNLRVEYL

SEQ ID NO: 27789 - protein, 8 aa, Homo sapiens
  AACR GENIE Results; TP53_p.G199V; B0801
EVNLRVEY

SEQ ID NO: 27790 - protein, 9 aa, Homo sapiens
  AACR GENIE Results; TP53_p.G199V; A0201
HLIRVEVNL

SEQ ID NO: 27791 - protein, 8 aa, Homo sapiens
  AACR GENIE Results; TP53_p.G199V; C1601
EVNLRVEY

SEQ ID NO: 27792 - protein, 10 aa, Homo sapiens
  AACR GENIE Results; TP53_p.G199V; A0101
RVEVNLRVEY

SEQ ID NO: 27793 - protein, 9 aa, Homo sapiens
  AACR GENIE Results; TP53_p.G244D; B1402
DGMNRRPIL

SEQ ID NO: 27794 - protein, 9 aa, Homo sapiens
  AACR GENIE Results; TP53_p.G244D; B0801
DGMNRRPIL

SEQ ID NO: 27795 - protein, 8 aa, Homo sapiens
  AACR GENIE Results; TP53_p.G244S; A3303
SCMSGMNR

SEQ ID NO: 27796 - protein, 8 aa, Homo sapiens
  AACR GENIE Results; TP53_p.G244S; A1101
SCMSGMNR

SEQ ID NO: 27797 - protein, 9 aa, Homo sapiens
  AACR GENIE Results; TP53_p.G244V; A1101
SSCMVGMNR

SEQ ID NO: 27798 - protein, 8 aa, Homo sapiens
  AACR GENIE Results; TP53_p.G244V; A1101
SCMVGMNR

SEQ ID NO: 27799 - protein, 8 aa, Homo sapiens
  AACR GENIE Results; TP53_p.G245A; A1101
SCMGAMNR

SEQ ID NO: 27800 - protein, 8 aa, Homo sapiens
  AACR GENIE Results; TP53_p.G245A; A3101
SCMGAMNR

SEQ ID NO: 27801 - protein, 8 aa, Homo sapiens
  AACR GENIE Results; TP53_p.G245A; A6801
SCMGAMNR

SEQ ID NO: 27802 - protein, 9 aa, Homo sapiens
  AACR GENIE Results; TP53_p.G245A; C1601
GAMNRRPIL

SEQ ID NO: 27803 - protein, 9 aa, Homo sapiens
  AACR GENIE Results; TP53_p.G245A; A6801
SSCMGAMNR

SEQ ID NO: 27804 - protein, 10 aa, Homo sapiens
  AACR GENIE Results; TP53_p.G245A; A6801
NSSCMGAMNR

SEQ ID NO: 27805 - protein, 8 aa, Homo sapiens
  AACR GENIE Results; TP53_p.G245D; B0801
DMNRRPIL

SEQ ID NO: 27806 - protein, 8 aa, Homo sapiens
  AACR GENIE Results; TP53_p.G245S; A3303
SCMGSMNR

SEQ ID NO: 27807 - protein, 8 aa, Homo sapiens
  AACR GENIE Results; TP53_p.G245S; A3101
SCMGSMNR

SEQ ID NO: 27808 - protein, 9 aa, Homo sapiens
  AACR GENIE Results; TP53_p.G245S; B4102
GSMNRRPIL

SEQ ID NO: 27809 - protein, 9 aa, Homo sapiens
  AACR GENIE Results; TP53_p.G245V; A6801
SSCMGVMNR

SEQ ID NO: 27810 - protein, 10 aa, Homo sapiens
  AACR GENIE Results; TP53_p.G245V; A6801
NSSCMGVMNR

SEQ ID NO: 27811 - protein, 8 aa, Homo sapiens
  AACR GENIE Results; TP53_p.G245V; A3303
SCMGVMNR

SEQ ID NO: 27812 - protein, 8 aa, Homo sapiens
  AACR GENIE Results; TP53_p.G245V; A3101
SCMGVMNR

SEQ ID NO: 27813 - protein, 8 aa, Homo sapiens
  AACR GENIE Results; TP53_p.G245V; A6801
SCMGVMNR

SEQ ID NO: 27814 - protein, 9 aa, Homo sapiens
  AACR GENIE Results; TP53_p.G245V; A3101
SSCMGVMNR

SEQ ID NO: 27815 - protein, 8 aa, Homo sapiens
  AACR GENIE Results; TP53_p.G245V; A1101
SCMGVMNR

SEQ ID NO: 27816 - protein, 9 aa, Homo sapiens
  AACR GENIE Results; TP53_p.G245V; A1101
SSCMGVMNR

SEQ ID NO: 27817 - protein, 9 aa, Homo sapiens
  AACR GENIE Results; TP53_p.G245V; A3303
SSCMGVMNR

SEQ ID NO: 27818 - protein, 9 aa, Homo sapiens
  AACR GENIE Results; TP53_p.G245V; A3303
SCMGVMNRR

SEQ ID NO: 27819 - protein, 9 aa, Homo sapiens
  AACR GENIE Results; TP53_p.G245V; A3101
SCMGVMNRR

SEQ ID NO: 27820 - protein, 9 aa, Homo sapiens
  AACR GENIE Results; TP53_p.G262V; A6801
DSSVNLLGR

SEQ ID NO: 27821 - protein, 9 aa, Homo sapiens
  AACR GENIE Results; TP53_p.G262V; B4001
LEDSSVNLL

SEQ ID NO: 27822 - protein, 10 aa, Homo sapiens
  AACR GENIE Results; TP53_p.G262V; A6801
EDSSVNLLGR

SEQ ID NO: 27823 - protein, 10 aa, Homo sapiens
  AACR GENIE Results; TP53_p.G262V; A3201
SVNLLGRNSF

SEQ ID NO: 27824 - protein, 8 aa, Homo sapiens
  AACR GENIE Results; TP53_p.G262V; B4001
LEDSSVNL

SEQ ID NO: 27825 - protein, 9 aa, Homo sapiens
  AACR GENIE Results; TP53_p.G262V; C0802
TLEDSSVNL

SEQ ID NO: 27826 - protein, 10 aa, Homo sapiens
  AACR GENIE Results; TP53_p.G262V; B0702
SVNLLGRNSF

SEQ ID NO: 27827 - protein, 10 aa, Homo sapiens
  AACR GENIE Results; TP53_p.G262V; B1501
SVNLLGRNSF

SEQ ID NO: 27828 - protein, 9 aa, Homo sapiens
  AACR GENIE Results; TP53_p.G262V; A0201
TLEDSSVNL

SEQ ID NO: 27829 - protein, 9 aa, Homo sapiens
  AACR GENIE Results; TP53_p.G262V; C0802
LEDSSVNLL

SEQ ID NO: 27830 - protein, 9 aa, Homo sapiens
  AACR GENIE Results; TP53_p.G262V; C0501
TLEDSSVNL

SEQ ID NO: 27831 - protein, 8 aa, Homo sapiens
  AACR GENIE Results; TP53_p.G262V; C0802
LEDSSVNL

SEQ ID NO: 27832 - protein, 9 aa, Homo sapiens
  AACR GENIE Results; TP53_p.G266E; A6801
DSSGNLLER

SEQ ID NO: 27833 - protein, 9 aa, Homo sapiens
  AACR GENIE Results; TP53_p.G266E; A3301
DSSGNLLER

SEQ ID NO: 27834 - protein, 9 aa, Homo sapiens
  AACR GENIE Results; TP53_p.G266E; A3303
DSSGNLLER

SEQ ID NO: 27835 - protein, 10 aa, Homo sapiens
  AACR GENIE Results; TP53_p.G266E; A6801
EDSSGNLLER

SEQ ID NO: 27836 - protein, 9 aa, Homo sapiens
  AACR GENIE Results; TP53_p.G266E; C0602
ERNSFEVRV

SEQ ID NO: 27837 - protein, 10 aa, Homo sapiens
  AACR GENIE Results; TP53_p.G266E; A3303
EDSSGNLLER

SEQ ID NO: 27838 - protein, 10 aa, Homo sapiens
  AACR GENIE Results; TP53_p.G266E; A3301
EDSSGNLLER

SEQ ID NO: 27839 - protein, 9 aa, Homo sapiens
  AACR GENIE Results; TP53_p.G266E; B2705
ERNSFEVRV

SEQ ID NO: 27840 - protein, 11 aa, Homo sapiens
  AACR GENIE Results; TP53_p.G266E; A3301
NLLERNSFEVR

SEQ ID NO: 27841 - protein, 9 aa, Homo sapiens
  AACR GENIE Results; TP53_p.G266E; A6802
ERNSFEVRV

SEQ ID NO: 27842 - protein, 8 aa, Homo sapiens
  AACR GENIE Results; TP53_p.G266E; B4901
LERNSFEV

SEQ ID NO: 27843 - protein, 11 aa, Homo sapiens
  AACR GENIE Results; TP53_p.G266E; B2702
LEDSSGNLLER

SEQ ID NO: 27844 - protein, 9 aa, Homo sapiens
  AACR GENIE Results; TP53_p.G266E; B3901
ERNSFEVRV

SEQ ID NO: 27845 - protein, 8 aa, Homo sapiens
  AACR GENIE Results; TP53_p.G266E; A3001
LERNSFEV

SEQ ID NO: 27846 - protein, 10 aa, Homo sapiens
  AACR GENIE Results; TP53_p.G266E; A0201
NLLERNSFEV

SEQ ID NO: 27847 - protein, 10 aa, Homo sapiens
  AACR GENIE Results; TP53_p.G266E; B2702
EDSSGNLLER

SEQ ID NO: 27848 - protein, 9 aa, Homo sapiens
  AACR GENIE Results; TP53_p.G266E; B3801
ERNSFEVRV

SEQ ID NO: 27849 - protein, 11 aa, Homo sapiens
  AACR GENIE Results; TP53_p.G266E; A6801
LEDSSGNLLER

SEQ ID NO: 27850 - protein, 9 aa, Homo sapiens
  AACR GENIE Results; TP53_p.G266R; A6801
DSSGNLLRR

SEQ ID NO: 27851 - protein, 9 aa, Homo sapiens
  AACR GENIE Results; TP53_p.G266R; A3301
DSSGNLLRR

SEQ ID NO: 27852 - protein, 9 aa, Homo sapiens
  AACR GENIE Results; TP53_p.G266R; A6801
EDSSGNLLR

SEQ ID NO: 27853 - protein, 9 aa, Homo sapiens
  AACR GENIE Results; TP53_p.G266R; A3303
DSSGNLLRR

SEQ ID NO: 27854 - protein, 10 aa, Homo sapiens
  AACR GENIE Results; TP53_p.G266R; A6801
EDSSGNLLRR

SEQ ID NO: 27855 - protein, 9 aa, Homo sapiens
  AACR GENIE Results; TP53_p.G266R; C0602
RRNSFEVRV

SEQ ID NO: 27856 - protein, 11 aa, Homo sapiens
  AACR GENIE Results; TP53_p.G266R; A6801
TLEDSSGNLLR

SEQ ID NO: 27857 - protein, 9 aa, Homo sapiens
  AACR GENIE Results; TP53_p.G266R; A3303
EDSSGNLLR

SEQ ID NO: 27858 - protein, 9 aa, Homo sapiens
  AACR GENIE Results; TP53_p.G266R; A3301
EDSSGNLLR

SEQ ID NO: 27859 - protein, 8 aa, Homo sapiens
  AACR GENIE Results; TP53_p.G266R; A6801
DSSGNLLR

SEQ ID NO: 27860 - protein, 10 aa, Homo sapiens
  AACR GENIE Results; TP53_p.G266R; A3301
EDSSGNLLRR

SEQ ID NO: 27861 - protein, 10 aa, Homo sapiens
  AACR GENIE Results; TP53_p.G266R; A3303
EDSSGNLLRR

SEQ ID NO: 27862 - protein, 10 aa, Homo sapiens
  AACR GENIE Results; TP53_p.G266R; B2702
LEDSSGNLLR

SEQ ID NO: 27863 - protein, 11 aa, Homo sapiens
  AACR GENIE Results; TP53_p.G266R; B2702
TLEDSSGNLLR

SEQ ID NO: 27864 - protein, 9 aa, Homo sapiens
  AACR GENIE Results; TP53_p.G266R; B2705
RRNSFEVRV

SEQ ID NO: 27865 - protein, 9 aa, Homo sapiens
  AACR GENIE Results; TP53_p.G266R; B2702
EDSSGNLLR

SEQ ID NO: 27866 - protein, 9 aa, Homo sapiens
  AACR GENIE Results; TP53_p.G266V; A6801
DSSGNLLVR

SEQ ID NO: 27867 - protein, 9 aa, Homo sapiens
  AACR GENIE Results; TP53_p.G266V; A3301
DSSGNLLVR

SEQ ID NO: 27868 - protein, 9 aa, Homo sapiens
  AACR GENIE Results; TP53_p.G266V; A3303
DSSGNLLVR

SEQ ID NO: 27869 - protein, 9 aa, Homo sapiens
  AACR GENIE Results; TP53_p.G266V; C0602
VRNSFEVRV

SEQ ID NO: 27870 - protein, 10 aa, Homo sapiens
  AACR GENIE Results; TP53_p.G266V; A6801
EDSSGNLLVR

SEQ ID NO: 27871 - protein, 10 aa, Homo sapiens
  AACR GENIE Results; TP53_p.G266V; B4901
LEDSSGNLLV

SEQ ID NO: 27872 - protein, 10 aa, Homo sapiens
  AACR GENIE Results; TP53_p.G266V; A3303
EDSSGNLLVR

SEQ ID NO: 27873 - protein, 9 aa, Homo sapiens
  AACR GENIE Results; TP53_p.G266V; B2705
VRNSFEVRV

SEQ ID NO: 27874 - protein, 9 aa, Homo sapiens
  AACR GENIE Results; TP53_p.G266V; A3101
LVRNSFEVR

SEQ ID NO: 27875 - protein, 9 aa, Homo sapiens
  AACR GENIE Results; TP53_p.G266V; A3303
LVRNSFEVR

SEQ ID NO: 27876 - protein, 10 aa, Homo sapiens
  AACR GENIE Results; TP53_p.G266V; A3301
EDSSGNLLVR

SEQ ID NO: 27877 - protein, 11 aa, Homo sapiens
  AACR GENIE Results; TP53_p.G266V; B2702
LEDSSGNLLVR

SEQ ID NO: 27878 - protein, 11 aa, Homo sapiens
  AACR GENIE Results; TP53_p.G266V; B1302
TLEDSSGNLLV

SEQ ID NO: 27879 - protein, 8 aa, Homo sapiens
  AACR GENIE Results; TP53_p.G266V; A6801
SSGNLLVR

SEQ ID NO: 27880 - protein, 10 aa, Homo sapiens
  AACR GENIE Results; TP53_p.G266V; B2702
EDSSGNLLVR

SEQ ID NO: 27881 - protein, 9 aa, Homo sapiens
  AACR GENIE Results; TP53_p.G266V; A3301
LVRNSFEVR

SEQ ID NO: 27882 - protein, 9 aa, Homo sapiens
  AACR GENIE Results; TP53_p.G266V; A1101
DSSGNLLVR

SEQ ID NO: 27883 - protein, 8 aa, Homo sapiens
  AACR GENIE Results; TP53_p.G266V; B5101
DSSGNLLV

SEQ ID NO: 27884 - protein, 9 aa, Homo sapiens
  AACR GENIE Results; TP53_p.G334V; B5701
RVRERFEMF

SEQ ID NO: 27885 - protein, 10 aa, Homo sapiens
  AACR GENIE Results; TP53_p.G334W; B4403
GEYFTLQIRW

SEQ ID NO: 27886 - protein, 10 aa, Homo sapiens
  AACR GENIE Results; TP53_p.G334W; B4402
GEYFTLQIRW

SEQ ID NO: 27887 - protein, 9 aa, Homo sapiens
  AACR GENIE Results; TP53_p.G334W; A2402
EYFTLQIRW

SEQ ID NO: 27888 - protein, 9 aa, Homo sapiens
  AACR GENIE Results; TP53_p.G334W; B4403
EYFTLQIRW

SEQ ID NO: 27889 - protein, 8 aa, Homo sapiens
  AACR GENIE Results; TP53_p.G334W; B5701
YFTLQIRW

SEQ ID NO: 27890 - protein, 9 aa, Homo sapiens
  AACR GENIE Results; TP53_p.G334W; B5701
EYFTLQIRW

SEQ ID NO: 27891 - protein, 9 aa, Homo sapiens
  AACR GENIE Results; TP53_p.G334W; B4402
EYFTLQIRW

SEQ ID NO: 27892 - protein, 9 aa, Homo sapiens
  AACR GENIE Results; TP53_p.H168L; C0304
MAIYKQSQL

SEQ ID NO: 27893 - protein, 9 aa, Homo sapiens
  AACR GENIE Results; TP53_p.H168L; B0801
MAIYKQSQL

SEQ ID NO: 27894 - protein, 9 aa, Homo sapiens
  AACR GENIE Results; TP53_p.H168L; C1203
MAIYKQSQL

SEQ ID NO: 27895 - protein, 9 aa, Homo sapiens
  AACR GENIE Results; TP53_p.H168L; A0201
KQSQLMTEV

SEQ ID NO: 27896 - protein, 9 aa, Homo sapiens
  AACR GENIE Results; TP53_p.H168L; A0301
AIYKQSQLM

SEQ ID NO: 27897 - protein, 9 aa, Homo sapiens
  AACR GENIE Results; TP53_p.H168L; A1101
QLMTEVVRR

SEQ ID NO: 27898 - protein, 8 aa, Homo sapiens
  AACR GENIE Results; TP53_p.H168L; B0801
AIYKQSQL

SEQ ID NO: 27899 - protein, 9 aa, Homo sapiens
  AACR GENIE Results; TP53_p.H168L; B0702
MAIYKQSQL

SEQ ID NO: 27900 - protein, 9 aa, Homo sapiens
  AACR GENIE Results; TP53_p.H168L; A0201
QLMTEVVRR

SEQ ID NO: 27901 - protein, 9 aa, Homo sapiens
  AACR GENIE Results; TP53_p.H168L; A1101
AIYKQSQLM

SEQ ID NO: 27902 - protein, 8 aa, Homo sapiens
  AACR GENIE Results; TP53_p.H168L; B0702
AIYKQSQL

SEQ ID NO: 27903 - protein, 8 aa, Homo sapiens
  AACR GENIE Results; TP53_p.H168L; B0801
IYKQSQLM

SEQ ID NO: 27904 - protein, 9 aa, Homo sapiens
  AACR GENIE Results; TP53_p.H168R; B2705
QRMTEVVRR

SEQ ID NO: 27905 - protein, 8 aa, Homo sapiens
  AACR GENIE Results; TP53_p.H168R; B1302
SQRMTEVV

SEQ ID NO: 27906 - protein, 9 aa, Homo sapiens
  AACR GENIE Results; TP53_p.H168R; A6801
MAIYKQSQR

SEQ ID NO: 27907 - protein, 8 aa, Homo sapiens
  AACR GENIE Results; TP53_p.H168R; B1501
SQRMTEVV

SEQ ID NO: 27908 - protein, 8 aa, Homo sapiens
  AACR GENIE Results; TP53_p.H168R; A3101
RMTEVVRR

SEQ ID NO: 27909 - protein, 9 aa, Homo sapiens
  AACR GENIE Results; TP53_p.H168R; A3101
SQRMTEVVR

SEQ ID NO: 27910 - protein, 9 aa, Homo sapiens
  AACR GENIE Results; TP53_p.H168R; B1501
AIYKQSQRM

SEQ ID NO: 27911 - protein, 9 aa, Homo sapiens
  AACR GENIE Results; TP53_p.H168R; B1302
KQSQRMTEV

SEQ ID NO: 27912 - protein, 8 aa, Homo sapiens
  AACR GENIE Results; TP53_p.H168R; B2705
QRMTEVVR

SEQ ID NO: 27913 - protein, 9 aa, Homo sapiens
  AACR GENIE Results; TP53_p.H168R; A0301
AIYKQSQRM

SEQ ID NO: 27914 - protein, 9 aa, Homo sapiens
  AACR GENIE Results; TP53_p.H168R; B1302
AIYKQSQRM

SEQ ID NO: 27915 - protein, 9 aa, Homo sapiens
  AACR GENIE Results; TP53_p.H168R; B1501
SQRMTEVVR

SEQ ID NO: 27916 - protein, 10 aa, Homo sapiens
  AACR GENIE Results; TP53_p.H168R; A6801
QSQRMTEVVR

SEQ ID NO: 27917 - protein, 8 aa, Homo sapiens
  AACR GENIE Results; TP53_p.H168R; A3001
SQRMTEVV

SEQ ID NO: 27918 - protein, 10 aa, Homo sapiens
  AACR GENIE Results; TP53_p.H168R; A3101
SQRMTEVVRR

SEQ ID NO: 27919 - protein, 8 aa, Homo sapiens
  AACR GENIE Results; TP53_p.H168R; A0301
AIYKQSQR

SEQ ID NO: 27920 - protein, 9 aa, Homo sapiens
  AACR GENIE Results; TP53_p.H178Tfs*69; B4403
SEWKEICVW

SEQ ID NO: 27921 - protein, 9 aa, Homo sapiens
  AACR GENIE Results; TP53_p.H178Tfs*69; C1203
SAAQIAMVW

SEQ ID NO: 27922 - protein, 9 aa, Homo sapiens
  AACR GENIE Results; TP53_p.H178Tfs*69; B5101
VPPSTTTTC

SEQ ID NO: 27923 - protein, 9 aa, Homo sapiens
  AACR GENIE Results; TP53_p.H178Tfs*69; B4402
SEWKEICVW

SEQ ID NO: 27924 - protein, 9 aa, Homo sapiens
  AACR GENIE Results; TP53_p.H178Tfs*69; B3501
SAAQIAMVW

SEQ ID NO: 27925 - protein, 11 aa, Homo sapiens
  AACR GENIE Results; TP53_p.H178Tfs*69; A2402
VWPLLSILSEW

SEQ ID NO: 27926 - protein, 10 aa, Homo sapiens
  AACR GENIE Results; TP53_p.H178Tfs*69; B5101
VPPSTTTTCV

SEQ ID NO: 27927 - protein, 10 aa, Homo sapiens
  AACR GENIE Results; TP53_p.H178Tfs*69; B0702
VPPSTTTTCV

SEQ ID NO: 27928 - protein, 9 aa, Homo sapiens
  AACR GENIE Results; TP53_p.H178Tfs*69; B4403
TETLFDIVW

SEQ ID NO: 27929 - protein, 8 aa, Homo sapiens
  AACR GENIE Results; TP53_p.H178Tfs*69; B5101
VPPSTTTT

SEQ ID NO: 27930 - protein, 8 aa, Homo sapiens
  AACR GENIE Results; TP53_p.H178Tfs*69; B5101
SAAQIAMV

SEQ ID NO: 27931 - protein, 8 aa, Homo sapiens
  AACR GENIE Results; TP53_p.H178Tfs*69; B1801
TETLFDIV

SEQ ID NO: 27932 - protein, 10 aa, Homo sapiens
  AACR GENIE Results; TP53_p.H179Y; A3001
YERCSDSDGL

SEQ ID NO: 27933 - protein, 9 aa, Homo sapiens
  AACR GENIE Results; TP53_p.H193L; B1302
GLAPPQLLI

SEQ ID NO: 27934 - protein, 11 aa, Homo sapiens
  AACR GENIE Results; TP53_p.H193L; A0201
GLAPPQLLIRV

SEQ ID NO: 27935 - protein, 8 aa, Homo sapiens
  AACR GENIE Results; TP53_p.H193L; B5101
LAPPQLLI

SEQ ID NO: 27936 - protein, 9 aa, Homo sapiens
  AACR GENIE Results; TP53_p.H193L; A0201
GLAPPQLLI

SEQ ID NO: 27937 - protein, 8 aa, Homo sapiens
  AACR GENIE Results; TP53_p.H193L; B5101
DGLAPPQL

SEQ ID NO: 27938 - protein, 10 aa, Homo sapiens
  AACR GENIE Results; TP53_p.H193L; B5101
DGLAPPQLLI

SEQ ID NO: 27939 - protein, 9 aa, Homo sapiens
  AACR GENIE Results; TP53_p.H193P; A0201
GLAPPQPLI

SEQ ID NO: 27940 - protein, 8 aa, Homo sapiens
  AACR GENIE Results; TP53_p.H193P; B5101
LAPPQPLI

SEQ ID NO: 27941 - protein, 11 aa, Homo sapiens
  AACR GENIE Results; TP53_p.H193P; A0201
GLAPPQPLIRV

SEQ ID NO: 27942 - protein, 9 aa, Homo sapiens
  AACR GENIE Results; TP53_p.H193P; B5101
APPQPLIRV

SEQ ID NO: 27943 - protein, 10 aa, Homo sapiens
  AACR GENIE Results; TP53_p.H193P; A0301
GLAPPQPLIR

SEQ ID NO: 27944 - protein, 10 aa, Homo sapiens
  AACR GENIE Results; TP53_p.H193P; B5101
DGLAPPQPLI

SEQ ID NO: 27945 - protein, 9 aa, Homo sapiens
  AACR GENIE Results; TP53_p.H193P; B1501
GLAPPQPLI

SEQ ID NO: 27946 - protein, 9 aa, Homo sapiens
  AACR GENIE Results; TP53_p.H193P; B0702
APPQPLIRV

SEQ ID NO: 27947 - protein, 9 aa, Homo sapiens
  AACR GENIE Results; TP53_p.H193P; B5101
LAPPQPLIR

SEQ ID NO: 27948 - protein, 9 aa, Homo sapiens
  AACR GENIE Results; TP53_p.H193R; B1302
GLAPPQRLI

SEQ ID NO: 27949 - protein, 10 aa, Homo sapiens
  AACR GENIE Results; TP53_p.H193R; A6801
DSDGLAPPQR

SEQ ID NO: 27950 - protein, 10 aa, Homo sapiens
  AACR GENIE Results; TP53_p.H193R; B5101
DGLAPPQRLI

SEQ ID NO: 27951 - protein, 11 aa, Homo sapiens
  AACR GENIE Results; TP53_p.H193R; A0201
GLAPPQRLIRV

SEQ ID NO: 27952 - protein, 11 aa, Homo sapiens
  AACR GENIE Results; TP53_p.H193R; A6801
SDSDGLAPPQR

SEQ ID NO: 27953 - protein, 9 aa, Homo sapiens
  AACR GENIE Results; TP53_p.H193R; A0201
GLAPPQRLI

SEQ ID NO: 27954 - protein, 8 aa, Homo sapiens
  AACR GENIE Results; TP53_p.H193R; C1701
GLAPPQRL

SEQ ID NO: 27955 - protein, 9 aa, Homo sapiens
  AACR GENIE Results; TP53_p.H193R; B5101
DGLAPPQRL

SEQ ID NO: 27956 - protein, 8 aa, Homo sapiens
  AACR GENIE Results; TP53_p.H193R; B5101
LAPPQRLI

SEQ ID NO: 27957 - protein, 11 aa, Homo sapiens
  AACR GENIE Results; TP53_p.H193Y; A0201
GLAPPQYLIRV

SEQ ID NO: 27958 - protein, 9 aa, Homo sapiens
  AACR GENIE Results; TP53_p.H193Y; B1302
GLAPPQYLI

SEQ ID NO: 27959 - protein, 10 aa, Homo sapiens
  AACR GENIE Results; TP53_p.H193Y; A0101
DSDGLAPPQY

SEQ ID NO: 27960 - protein, 9 aa, Homo sapiens
  AACR GENIE Results; TP53_p.H193Y; A0201
GLAPPQYLI

SEQ ID NO: 27961 - protein, 9 aa, Homo sapiens
  AACR GENIE Results; TP53_p.H193Y; B1801
SDGLAPPQY

SEQ ID NO: 27962 - protein, 8 aa, Homo sapiens
  AACR GENIE Results; TP53_p.H193Y; B1801
DGLAPPQY

SEQ ID NO: 27963 - protein, 11 aa, Homo sapiens
  AACR GENIE Results; TP53_p.H193Y; A6802
GLAPPQYLIRV

SEQ ID NO: 27964 - protein, 8 aa, Homo sapiens
  AACR GENIE Results; TP53_p.H193Y; B3501
DGLAPPQY

SEQ ID NO: 27965 - protein, 8 aa, Homo sapiens
  AACR GENIE Results; TP53_p.H193Y; C1701
GLAPPQYL

SEQ ID NO: 27966 - protein, 8 aa, Homo sapiens
  AACR GENIE Results; TP53_p.H193Y; B5101
DGLAPPQY

SEQ ID NO: 27967 - protein, 11 aa, Homo sapiens
  AACR GENIE Results; TP53_p.H193Y; A3301
DGLAPPQYLIR

SEQ ID NO: 27968 - protein, 9 aa, Homo sapiens
  AACR GENIE Results; TP53_p.H193Y; B5101
APPQYLIRV

SEQ ID NO: 27969 - protein, 9 aa, Homo sapiens
  AACR GENIE Results; TP53_p.H193Y; B5101
LAPPQYLIR

SEQ ID NO: 27970 - protein, 9 aa, Homo sapiens
  AACR GENIE Results; TP53_p.H193Y; B4403
SDGLAPPQY

SEQ ID NO: 27971 - protein, 8 aa, Homo sapiens
  AACR GENIE Results; TP53_p.H193Y; B3901
DGLAPPQY

SEQ ID NO: 27972 - protein, 10 aa, Homo sapiens
  AACR GENIE Results; TP53_p.H214L; A0201
YLDDRNTFRL

SEQ ID NO: 27973 - protein, 11 aa, Homo sapiens
  AACR GENIE Results; TP53_p.H214L; A2402
EYLDDRNTFRL

SEQ ID NO: 27974 - protein, 10 aa, Homo sapiens
  AACR GENIE Results; TP53_p.H214Lfs*33; B0702
VPPSTTTTCV

SEQ ID NO: 27975 - protein, 9 aa, Homo sapiens
  AACR GENIE Results; TP53_p.H214R; A6802
NTFRRSVVV

SEQ ID NO: 27976 - protein, 11 aa, Homo sapiens
  AACR GENIE Results; TP53_p.H214R; A3303
EYLDDRNTFRR

SEQ ID NO: 27977 - protein, 9 aa, Homo sapiens
  AACR GENIE Results; TP53_p.H214R; B1402
DRNTFRRSV

SEQ ID NO: 27978 - protein, 9 aa, Homo sapiens
  AACR GENIE Results; TP53_p.I162Sfs*8; B1501
RAMASTSSH

SEQ ID NO: 27979 - protein, 10 aa, Homo sapiens
  AACR GENIE Results; TP53_p.I162Sfs*8; A0201
AMASTSSHST

SEQ ID NO: 27980 - protein, 9 aa, Homo sapiens
  AACR GENIE Results; TP53_p.I162Sfs*8; B0702
RAMASTSSH

SEQ ID NO: 27981 - protein, 9 aa, Homo sapiens
  AACR GENIE Results; TP53_p.I195F; B1501
GLAPPQHLF

SEQ ID NO: 27982 - protein, 11 aa, Homo sapiens
  AACR GENIE Results; TP53_p.I195F; A0201
GLAPPQHLFRV

SEQ ID NO: 27983 - protein, 10 aa, Homo sapiens
  AACR GENIE Results; TP53_p.I195F; A0301
GLAPPQHLFR

SEQ ID NO: 27984 - protein, 11 aa, Homo sapiens
  AACR GENIE Results; TP53_p.I195N; A0201
GLAPPQHLNRV

SEQ ID NO: 27985 - protein, 10 aa, Homo sapiens
  AACR GENIE Results; TP53_p.I195N; A3101
GLAPPQHLNR

SEQ ID NO: 27986 - protein, 10 aa, Homo sapiens
  AACR GENIE Results; TP53_p.I195N; A0301
GLAPPQHLNR

SEQ ID NO: 27987 - protein, 9 aa, Homo sapiens
  AACR GENIE Results; TP53_p.I195N; B5101
APPQHLNRV

SEQ ID NO: 27988 - protein, 8 aa, Homo sapiens
  AACR GENIE Results; TP53_p.I195N; B2705
NRVEGNLR

SEQ ID NO: 27989 - protein, 11 aa, Homo sapiens
  AACR GENIE Results; TP53_p.I195T; A3301
DGLAPPQHLTR

SEQ ID NO: 27990 - protein, 11 aa, Homo sapiens
  AACR GENIE Results; TP53_p.I195T; A0201
GLAPPQHLTRV

SEQ ID NO: 27991 - protein, 10 aa, Homo sapiens
  AACR GENIE Results; TP53_p.I195T; A0301
GLAPPQHLTR

SEQ ID NO: 27992 - protein, 9 aa, Homo sapiens
  AACR GENIE Results; TP53_p.I195T; B3901
TRVEGNLRV

SEQ ID NO: 27993 - protein, 11 aa, Homo sapiens
  AACR GENIE Results; TP53_p.I195T; A3303
DGLAPPQHLTR

SEQ ID NO: 27994 - protein, 9 aa, Homo sapiens
  AACR GENIE Results; TP53_p.I195T; B2705
TRVEGNLRV

SEQ ID NO: 27995 - protein, 11 aa, Homo sapiens
  AACR GENIE Results; TP53_p.I195T; B2702
TRVEGNLRVEY

SEQ ID NO: 27996 - protein, 10 aa, Homo sapiens
  AACR GENIE Results; TP53_p.I195T; A3101
GLAPPQHLTR

SEQ ID NO: 27997 - protein, 9 aa, Homo sapiens
  AACR GENIE Results; TP53_p.I195T; B5101
LAPPQHLTR

SEQ ID NO: 27998 - protein, 9 aa, Homo sapiens
  AACR GENIE Results; TP53_p.I195T; A3303
LTRVEGNLR

SEQ ID NO: 27999 - protein, 11 aa, Homo sapiens
  AACR GENIE Results; TP53_p.I195T; A6802
GLAPPQHLTRV

SEQ ID NO: 28000 - protein, 9 aa, Homo sapiens
  AACR GENIE Results; TP53_p.I195T; B0702
APPQHLTRV

SEQ ID NO: 28001 - protein, 8 aa, Homo sapiens
  AACR GENIE Results; TP53_p.I195T; B2705
TRVEGNLR

SEQ ID NO: 28002 - protein, 9 aa, Homo sapiens
  AACR GENIE Results; TP53_p.I195T; B5101
APPQHLTRV

SEQ ID NO: 28003 - protein, 10 aa, Homo sapiens
  AACR GENIE Results; TP53_p.I195T; A6801
GLAPPQHLTR

SEQ ID NO: 28004 - protein, 9 aa, Homo sapiens
  AACR GENIE Results; TP53_p.I195T; B1302
TRVEGNLRV

SEQ ID NO: 28005 - protein, 9 aa, Homo sapiens
  AACR GENIE Results; TP53_p.I195T; A0201
GLAPPQHLT

SEQ ID NO: 28006 - protein, 11 aa, Homo sapiens
  AACR GENIE Results; TP53_p.I195T; A6801
DGLAPPQHLTR

SEQ ID NO: 28007 - protein, 9 aa, Homo sapiens
  AACR GENIE Results; TP53_p.I232F; A0101
GSDCTTFHY

SEQ ID NO: 28008 - protein, 9 aa, Homo sapiens
  AACR GENIE Results; TP53_p.I232N; A0101
GSDCTTNHY

SEQ ID NO: 28009 - protein, 8 aa, Homo sapiens
  AACR GENIE Results; TP53_p.I232N; C1601
CTTNHYNY

SEQ ID NO: 28010 - protein, 9 aa, Homo sapiens
  AACR GENIE Results; TP53_p.I232N; A2601
CTTNHYNYM

SEQ ID NO: 28011 - protein, 9 aa, Homo sapiens
  AACR GENIE Results; TP53_p.I232T; A0101
GSDCTTTHY

SEQ ID NO: 28012 - protein, 8 aa, Homo sapiens
  AACR GENIE Results; TP53_p.I232T; C1601
CTTTHYNY

SEQ ID NO: 28013 - protein, 9 aa, Homo sapiens
  AACR GENIE Results; TP53_p.I251F; B0702
RPFLTIITL

SEQ ID NO: 28014 - protein, 9 aa, Homo sapiens
  AACR GENIE Results; TP53_p.I251F; C0602
NRRPFLTII

SEQ ID NO: 28015 - protein, 9 aa, Homo sapiens
  AACR GENIE Results; TP53_p.I251F; B3503
RPFLTIITL

SEQ ID NO: 28016 - protein, 9 aa, Homo sapiens
  AACR GENIE Results; TP53_p.I251F; B3501
RPFLTIITL

SEQ ID NO: 28017 - protein, 9 aa, Homo sapiens
  AACR GENIE Results; TP53_p.I251F; B5501
RPFLTIITL

SEQ ID NO: 28018 - protein, 9 aa, Homo sapiens
  AACR GENIE Results; TP53_p.I254N; B0702
RPILTNITL

SEQ ID NO: 28019 - protein, 9 aa, Homo sapiens
  AACR GENIE Results; TP53_p.I254N; C0602
NRRPILTNI

SEQ ID NO: 28020 - protein, 9 aa, Homo sapiens
  AACR GENIE Results; TP53_p.I254N; B3501
RPILTNITL

SEQ ID NO: 28021 - protein, 9 aa, Homo sapiens
  AACR GENIE Results; TP53_p.I255del; C0602
RRPILTITL

SEQ ID NO: 28022 - protein, 8 aa, Homo sapiens
  AACR GENIE Results; TP53_p.I255del; B0702
RPILTITL

SEQ ID NO: 28023 - protein, 9 aa, Homo sapiens
  AACR GENIE Results; TP53_p.I255del; C0702
RRPILTITL

SEQ ID NO: 28024 - protein, 9 aa, Homo sapiens
  AACR GENIE Results; TP53_p.I255del; C0701
RRPILTITL

SEQ ID NO: 28025 - protein, 11 aa, Homo sapiens
  AACR GENIE Results; TP53_p.I255F; A0205
FTLEDSSGNLL

SEQ ID NO: 28026 - protein, 9 aa, Homo sapiens
  AACR GENIE Results; TP53_p.I255F; C0702
NRRPILTIF

SEQ ID NO: 28027 - protein, 9 aa, Homo sapiens
  AACR GENIE Results; TP53_p.I255F; C0602
NRRPILTIF

SEQ ID NO: 28028 - protein, 9 aa, Homo sapiens
  AACR GENIE Results; TP53_p.I255F; B0702
RPILTIFTL

SEQ ID NO: 28029 - protein, 11 aa, Homo sapiens
  AACR GENIE Results; TP53_p.I255F; B3801
FTLEDSSGNLL

SEQ ID NO: 28030 - protein, 11 aa, Homo sapiens
  AACR GENIE Results; TP53_p.I255F; A6802
FTLEDSSGNLL

SEQ ID NO: 28031 - protein, 11 aa, Homo sapiens
  AACR GENIE Results; TP53_p.I255F; C0304
FTLEDSSGNLL

SEQ ID NO: 28032 - protein, 11 aa, Homo sapiens
  AACR GENIE Results; TP53_p.I255F; B5001
FTLEDSSGNLL

SEQ ID NO: 28033 - protein, 11 aa, Homo sapiens
  AACR GENIE Results; TP53_p.I255F; A0201
FTLEDSSGNLL

SEQ ID NO: 28034 - protein, 11 aa, Homo sapiens
  AACR GENIE Results; TP53_p.I255F; B3503
FTLEDSSGNLL

SEQ ID NO: 28035 - protein, 11 aa, Homo sapiens
  AACR GENIE Results; TP53_p.I255F; C0303
FTLEDSSGNLL

SEQ ID NO: 28036 - protein, 9 aa, Homo sapiens
  AACR GENIE Results; TP53_p.I255F; B3503
RPILTIFTL

SEQ ID NO: 28037 - protein, 10 aa, Homo sapiens
  AACR GENIE Results; TP53_p.I255F; A6802
FTLEDSSGNL

SEQ ID NO: 28038 - protein, 9 aa, Homo sapiens
  AACR GENIE Results; TP53_p.I255S; B0702
RPILTISTL

SEQ ID NO: 28039 - protein, 9 aa, Homo sapiens
  AACR GENIE Results; TP53_p.I255S; B3501
RPILTISTL

SEQ ID NO: 28040 - protein, 9 aa, Homo sapiens
  AACR GENIE Results; TP53_p.I255S; B0801
RPILTISTL

SEQ ID NO: 28041 - protein, 9 aa, Homo sapiens
  AACR GENIE Results; TP53_p.K120E; B3501
TAESVTCTY

SEQ ID NO: 28042 - protein, 10 aa, Homo sapiens
  AACR GENIE Results; TP53_p.K120E; B1501
GTAESVTCTY

SEQ ID NO: 28043 - protein, 10 aa, Homo sapiens
  AACR GENIE Results; TP53_p.K120E; A2902
GTAESVTCTY

SEQ ID NO: 28044 - protein, 9 aa, Homo sapiens
  AACR GENIE Results; TP53_p.K120E; B5801
TAESVTCTY

SEQ ID NO: 28045 - protein, 10 aa, Homo sapiens
  AACR GENIE Results; TP53_p.K120E; A2601
GTAESVTCTY

SEQ ID NO: 28046 - protein, 9 aa, Homo sapiens
  AACR GENIE Results; TP53_p.K120E; B1501
TAESVTCTY

SEQ ID NO: 28047 - protein, 8 aa, Homo sapiens
  AACR GENIE Results; TP53_p.K120E; B3701
AESVTCTY

SEQ ID NO: 28048 - protein, 9 aa, Homo sapiens
  AACR GENIE Results; TP53_p.K120E; A0101
TAESVTCTY

SEQ ID NO: 28049 - protein, 10 aa, Homo sapiens
  AACR GENIE Results; TP53_p.K120E; B5801
GTAESVTCTY

SEQ ID NO: 28050 - protein, 8 aa, Homo sapiens
  AACR GENIE Results; TP53_p.K120E; B1801
AESVTCTY

SEQ ID NO: 28051 - protein, 9 aa, Homo sapiens
  AACR GENIE Results; TP53_p.K120E; B3901
TAESVTCTY

SEQ ID NO: 28052 - protein, 10 aa, Homo sapiens
  AACR GENIE Results; TP53_p.K120E; A1101
GTAESVTCTY

SEQ ID NO: 28053 - protein, 10 aa, Homo sapiens
  AACR GENIE Results; TP53_p.K120E; A0101
GTAESVTCTY

SEQ ID NO: 28054 - protein, 8 aa, Homo sapiens
  AACR GENIE Results; TP53_p.K120E; B4403
AESVTCTY

SEQ ID NO: 28055 - protein, 10 aa, Homo sapiens
  AACR GENIE Results; TP53_p.K120E; B1302
FLHSGTAESV

SEQ ID NO: 28056 - protein, 10 aa, Homo sapiens
  AACR GENIE Results; TP53_p.K120E; A0301
GTAESVTCTY

SEQ ID NO: 28057 - protein, 10 aa, Homo sapiens
  AACR GENIE Results; TP53_p.K120E; A3201
GTAESVTCTY

SEQ ID NO: 28058 - protein, 10 aa, Homo sapiens
  AACR GENIE Results; TP53_p.K120E; B5701
GTAESVTCTY

SEQ ID NO: 28059 - protein, 8 aa, Homo sapiens
  AACR GENIE Results; TP53_p.K120E; B4402
AESVTCTY

SEQ ID NO: 28060 - protein, 10 aa, Homo sapiens
  AACR GENIE Results; TP53_p.K120E; A6801
GTAESVTCTY

SEQ ID NO: 28061 - protein, 10 aa, Homo sapiens
  AACR GENIE Results; TP53_p.K120E; A0201
FLHSGTAESV

SEQ ID NO: 28062 - protein, 9 aa, Homo sapiens
  AACR GENIE Results; TP53_p.K120E; B3901
LHSGTAESV

SEQ ID NO: 28063 - protein, 9 aa, Homo sapiens
  AACR GENIE Results; TP53_p.K120E; B3801
LHSGTAESV

SEQ ID NO: 28064 - protein, 10 aa, Homo sapiens
  AACR GENIE Results; TP53_p.K120E; B2702
GTAESVTCTY

SEQ ID NO: 28065 - protein, 10 aa, Homo sapiens
  AACR GENIE Results; TP53_p.K120E; B3501
GTAESVTCTY

SEQ ID NO: 28066 - protein, 9 aa, Homo sapiens
  AACR GENIE Results; TP53_p.K120E; A0201
FLHSGTAES

SEQ ID NO: 28067 - protein, 10 aa, Homo sapiens
  AACR GENIE Results; TP53_p.K120E; B4403
GTAESVTCTY

SEQ ID NO: 28068 - protein, 9 aa, Homo sapiens
  AACR GENIE Results; TP53_p.K120E; A2601
TAESVTCTY

SEQ ID NO: 28069 - protein, 8 aa, Homo sapiens
  AACR GENIE Results; TP53_p.K120E; B1501
AESVTCTY

SEQ ID NO: 28070 - protein, 9 aa, Homo sapiens
  AACR GENIE Results; TP53_p.K120E; A3001
TAESVTCTY

SEQ ID NO: 28071 - protein, 10 aa, Homo sapiens
  AACR GENIE Results; TP53_p.K120E; B2705
GTAESVTCTY

SEQ ID NO: 28072 - protein, 9 aa, Homo sapiens
  AACR GENIE Results; TP53_p.K120E; B4901
AESVTCTYS

SEQ ID NO: 28073 - protein, 11 aa, Homo sapiens
  AACR GENIE Results; TP53_p.K120E; B5701
SGTAESVTCTY

SEQ ID NO: 28074 - protein, 9 aa, Homo sapiens
  AACR GENIE Results; TP53_p.K120E; B5701
TAESVTCTY

SEQ ID NO: 28075 - protein, 9 aa, Homo sapiens
  AACR GENIE Results; TP53_p.K120E; B1801
TAESVTCTY

SEQ ID NO: 28076 - protein, 9 aa, Homo sapiens
  AACR GENIE Results; TP53_p.K120E; A6801
TAESVTCTY

SEQ ID NO: 28077 - protein, 10 aa, Homo sapiens
  AACR GENIE Results; TP53_p.K120E; A6802
FLHSGTAESV

SEQ ID NO: 28078 - protein, 8 aa, Homo sapiens
  AACR GENIE Results; TP53_p.K120E; B5801
AESVTCTY

SEQ ID NO: 28079 - protein, 9 aa, Homo sapiens
  AACR GENIE Results; TP53_p.K120E; B3503
TAESVTCTY

SEQ ID NO: 28080 - protein, 9 aa, Homo sapiens
  AACR GENIE Results; TP53_p.K120E; C0202
TAESVTCTY

SEQ ID NO: 28081 - protein, 9 aa, Homo sapiens
  AACR GENIE Results; TP53_p.K120E; A2902
TAESVTCTY

SEQ ID NO: 28082 - protein, 10 aa, Homo sapiens
  AACR GENIE Results; TP53_p.K120E; A3101
GTAESVTCTY

SEQ ID NO: 28083 - protein, 9 aa, Homo sapiens
  AACR GENIE Results; TP53_p.K120E; B3801
TAESVTCTY

SEQ ID NO: 28084 - protein, 10 aa, Homo sapiens
  AACR GENIE Results; TP53_p.K132E; A2402
TYSPALNEMF

SEQ ID NO: 28085 - protein, 10 aa, Homo sapiens
  AACR GENIE Results; TP53_p.K132E; A2301
TYSPALNEMF

SEQ ID NO: 28086 - protein, 9 aa, Homo sapiens
  AACR GENIE Results; TP53_p.K132E; A2402
TYSPALNEM

SEQ ID NO: 28087 - protein, 9 aa, Homo sapiens
  AACR GENIE Results; TP53_p.K132E; A2301
TYSPALNEM

SEQ ID NO: 28088 - protein, 8 aa, Homo sapiens
  AACR GENIE Results; TP53_p.K132E; C0102
YSPALNEM

SEQ ID NO: 28089 - protein, 9 aa, Homo sapiens
  AACR GENIE Results; TP53_p.K132E; C0702
TYSPALNEM

SEQ ID NO: 28090 - protein, 9 aa, Homo sapiens
  AACR GENIE Results; TP53_p.K132E; A0201
ALNEMFCQL

SEQ ID NO: 28091 - protein, 9 aa, Homo sapiens
  AACR GENIE Results; TP53_p.K132E; B3801
TYSPALNEM

SEQ ID NO: 28092 - protein, 8 aa, Homo sapiens
  AACR GENIE Results; TP53_p.K132E; B3501
SPALNEMF

SEQ ID NO: 28093 - protein, 9 aa, Homo sapiens
  AACR GENIE Results; TP53_p.K132E; B3501
TYSPALNEM

SEQ ID NO: 28094 - protein, 10 aa, Homo sapiens
  AACR GENIE Results; TP53_p.K132E; B3801
TYSPALNEMF

SEQ ID NO: 28095 - protein, 9 aa, Homo sapiens
  AACR GENIE Results; TP53_p.K132E; C0602
TYSPALNEM

SEQ ID NO: 28096 - protein, 10 aa, Homo sapiens
  AACR GENIE Results; TP53_p.K132N; A2402
TYSPALNNMF

SEQ ID NO: 28097 - protein, 10 aa, Homo sapiens
  AACR GENIE Results; TP53_p.K132N; A2301
TYSPALNNMF

SEQ ID NO: 28098 - protein, 9 aa, Homo sapiens
  AACR GENIE Results; TP53_p.K132N; A2402
TYSPALNNM

SEQ ID NO: 28099 - protein, 9 aa, Homo sapiens
  AACR GENIE Results; TP53_p.K132N; C1402
TYSPALNNM

SEQ ID NO: 28100 - protein, 9 aa, Homo sapiens
  AACR GENIE Results; TP53_p.K132N; A2301
TYSPALNNM

SEQ ID NO: 28101 - protein, 10 aa, Homo sapiens
  AACR GENIE Results; TP53_p.K132N; C1402
TYSPALNNMF

SEQ ID NO: 28102 - protein, 8 aa, Homo sapiens
  AACR GENIE Results; TP53_p.K132N; B0702
SPALNNMF

SEQ ID NO: 28103 - protein, 9 aa, Homo sapiens
  AACR GENIE Results; TP53_p.K132N; B3901
TYSPALNNM

SEQ ID NO: 28104 - protein, 8 aa, Homo sapiens
  AACR GENIE Results; TP53_p.K132N; B3501
SPALNNMF

SEQ ID NO: 28105 - protein, 10 aa, Homo sapiens
  AACR GENIE Results; TP53_p.K132N; B5801
TYSPALNNMF

SEQ ID NO: 28106 - protein, 10 aa, Homo sapiens
  AACR GENIE Results; TP53_p.K132N; B3801
TYSPALNNMF

SEQ ID NO: 28107 - protein, 9 aa, Homo sapiens
  AACR GENIE Results; TP53_p.K132N; A2402
YSPALNNMF

SEQ ID NO: 28108 - protein, 8 aa, Homo sapiens
  AACR GENIE Results; TP53_p.K132N; C0102
YSPALNNM

SEQ ID NO: 28109 - protein, 10 aa, Homo sapiens
  AACR GENIE Results; TP53_p.K132N; B5701
TYSPALNNMF

SEQ ID NO: 28110 - protein, 9 aa, Homo sapiens
  AACR GENIE Results; TP53_p.K132N; C0102
YSPALNNMF

SEQ ID NO: 28111 - protein, 9 aa, Homo sapiens
  AACR GENIE Results; TP53_p.K132N; B3801
TYSPALNNM

SEQ ID NO: 28112 - protein, 9 aa, Homo sapiens
  AACR GENIE Results; TP53_p.K132R; A1101
CTYSPALNR

SEQ ID NO: 28113 - protein, 9 aa, Homo sapiens
  AACR GENIE Results; TP53_p.K132R; A3303
CTYSPALNR

SEQ ID NO: 28114 - protein, 10 aa, Homo sapiens
  AACR GENIE Results; TP53_p.K132R; A2402
TYSPALNRMF

SEQ ID NO: 28115 - protein, 9 aa, Homo sapiens
  AACR GENIE Results; TP53_p.K132R; A0301
CTYSPALNR

SEQ ID NO: 28116 - protein, 9 aa, Homo sapiens
  AACR GENIE Results; TP53_p.K132R; A3101
CTYSPALNR

SEQ ID NO: 28117 - protein, 10 aa, Homo sapiens
  AACR GENIE Results; TP53_p.K132R; A2301
TYSPALNRMF

SEQ ID NO: 28118 - protein, 9 aa, Homo sapiens
  AACR GENIE Results; TP53_p.K132R; A2402
TYSPALNRM

SEQ ID NO: 28119 - protein, 9 aa, Homo sapiens
  AACR GENIE Results; TP53_p.K132R; A3301
CTYSPALNR

SEQ ID NO: 28120 - protein, 9 aa, Homo sapiens
  AACR GENIE Results; TP53_p.K132R; A6801
CTYSPALNR

SEQ ID NO: 28121 - protein, 8 aa, Homo sapiens
  AACR GENIE Results; TP53_p.K132R; A3303
TYSPALNR

SEQ ID NO: 28122 - protein, 9 aa, Homo sapiens
  AACR GENIE Results; TP53_p.K132R; C1402
TYSPALNRM

SEQ ID NO: 28123 - protein, 9 aa, Homo sapiens
  AACR GENIE Results; TP53_p.K132R; A2301
TYSPALNRM

SEQ ID NO: 28124 - protein, 10 aa, Homo sapiens
  AACR GENIE Results; TP53_p.K132R; C1402
TYSPALNRMF

SEQ ID NO: 28125 - protein, 10 aa, Homo sapiens
  AACR GENIE Results; TP53_p.K132R; B5701
TYSPALNRMF

SEQ ID NO: 28126 - protein, 10 aa, Homo sapiens
  AACR GENIE Results; TP53_p.K132R; A6801
TCTYSPALNR

SEQ ID NO: 28127 - protein, 9 aa, Homo sapiens
  AACR GENIE Results; TP53_p.K132R; A3303
TYSPALNRM

SEQ ID NO: 28128 - protein, 8 aa, Homo sapiens
  AACR GENIE Results; TP53_p.K132R; A3101
TYSPALNR

SEQ ID NO: 28129 - protein, 8 aa, Homo sapiens
  AACR GENIE Results; TP53_p.K132R; B0702
SPALNRMF

SEQ ID NO: 28130 - protein, 8 aa, Homo sapiens
  AACR GENIE Results; TP53_p.K132R; A3301
TYSPALNR

SEQ ID NO: 28131 - protein, 9 aa, Homo sapiens
  AACR GENIE Results; TP53_p.K132R; B3901
TYSPALNRM

SEQ ID NO: 28132 - protein, 10 aa, Homo sapiens
  AACR GENIE Results; TP53_p.K132R; A3303
TCTYSPALNR

SEQ ID NO: 28133 - protein, 9 aa, Homo sapiens
  AACR GENIE Results; TP53_p.K132R; C0602
TYSPALNRM

SEQ ID NO: 28134 - protein, 9 aa, Homo sapiens
  AACR GENIE Results; TP53_p.K132R; B5701
YSPALNRMF

SEQ ID NO: 28135 - protein, 9 aa, Homo sapiens
  AACR GENIE Results; TP53_p.K139Rfs*31; B0702
APWPSTSSH

SEQ ID NO: 28136 - protein, 9 aa, Homo sapiens
  AACR GENIE Results; TP53_p.K139Rfs*31; B0702
HPRPAPASA

SEQ ID NO: 28137 - protein, 9 aa, Homo sapiens
  AACR GENIE Results; TP53_p.K139Rfs*31; B0801
IPHPRPAPA

SEQ ID NO: 28138 - protein, 9 aa, Homo sapiens
  AACR GENIE Results; TP53_p.K139Rfs*31; A0201
GLIPHPRPA

SEQ ID NO: 28139 - protein, 10 aa, Homo sapiens
  AACR GENIE Results; TP53_p.K139Rfs*31; A0201
LIPHPRPAPA

SEQ ID NO: 28140 - protein, 9 aa, Homo sapiens
  AACR GENIE Results; TP53_p.K139Rfs*31; B3501
APWPSTSSH

SEQ ID NO: 28141 - protein, 9 aa, Homo sapiens
  AACR GENIE Results; TP53_p.K139Rfs*31; B0702
IPHPRPAPA

SEQ ID NO: 28142 - protein, 8 aa, Homo sapiens
  AACR GENIE Results; TP53_p.K139Rfs*31; B0702
IPHPRPAP

SEQ ID NO: 28143 - protein, 9 aa, Homo sapiens
  AACR GENIE Results; TP53_p.K139Rfs*31; A0201
IPHPRPAPA

SEQ ID NO: 28144 - protein, 11 aa, Homo sapiens
  AACR GENIE Results; TP53_p.K139Rfs*31; B3501
APWPSTSSHST

SEQ ID NO: 28145 - protein, 9 aa, Homo sapiens
  AACR GENIE Results; TP53_p.K164E; B1501
AIYEQSQHM

SEQ ID NO: 28146 - protein, 10 aa, Homo sapiens
  AACR GENIE Results; TP53_p.K164E; B3501
MAIYEQSQHM

SEQ ID NO: 28147 - protein, 9 aa, Homo sapiens
  AACR GENIE Results; TP53_p.K164E; A0201
AIYEQSQHM

SEQ ID NO: 28148 - protein, 9 aa, Homo sapiens
  AACR GENIE Results; TP53_p.K164E; C0304
AIYEQSQHM

SEQ ID NO: 28149 - protein, 9 aa, Homo sapiens
  AACR GENIE Results; TP53_p.K164E; A0301
AIYEQSQHM

SEQ ID NO: 28150 - protein, 9 aa, Homo sapiens
  AACR GENIE Results; TP53_p.K164E; C0303
AIYEQSQHM

SEQ ID NO: 28151 - protein, 9 aa, Homo sapiens
  AACR GENIE Results; TP53_p.K164E; A2601
AIYEQSQHM

SEQ ID NO: 28152 - protein, 8 aa, Homo sapiens
  AACR GENIE Results; TP53_p.K164E; C0401
IYEQSQHM

SEQ ID NO: 28153 - protein, 9 aa, Homo sapiens
  AACR GENIE Results; TP53_p.K164E; C0202
AIYEQSQHM

SEQ ID NO: 28154 - protein, 9 aa, Homo sapiens
  AACR GENIE Results; TP53_p.K164E; B3501
MAIYEQSQH

SEQ ID NO: 28155 - protein, 9 aa, Homo sapiens
  AACR GENIE Results; TP53_p.K164E; A1101
AIYEQSQHM

SEQ ID NO: 28156 - protein, 9 aa, Homo sapiens
  AACR GENIE Results; TP53_p.L111P; B5701
GSYGFRPGF

SEQ ID NO: 28157 - protein, 9 aa, Homo sapiens
  AACR GENIE Results; TP53_p.L111P; C1402
SYGFRPGFL

SEQ ID NO: 28158 - protein, 8 aa, Homo sapiens
  AACR GENIE Results; TP53_p.L111P; C1402
SYGFRPGF

SEQ ID NO: 28159 - protein, 10 aa, Homo sapiens
  AACR GENIE Results; TP53_p.L111P; C1701
GSYGFRPGFL

SEQ ID NO: 28160 - protein, 9 aa, Homo sapiens
  AACR GENIE Results; TP53_p.L130F; A1101
CTYSPAFNK

SEQ ID NO: 28161 - protein, 9 aa, Homo sapiens
  AACR GENIE Results; TP53_p.L130F; A0301
CTYSPAFNK

SEQ ID NO: 28162 - protein, 9 aa, Homo sapiens
  AACR GENIE Results; TP53_p.L130F; A2402
TYSPAFNKM

SEQ ID NO: 28163 - protein, 10 aa, Homo sapiens
  AACR GENIE Results; TP53_p.L130F; A2402
TYSPAFNKMF

SEQ ID NO: 28164 - protein, 10 aa, Homo sapiens
  AACR GENIE Results; TP53_p.L130F; A2301
TYSPAFNKMF

SEQ ID NO: 28165 - protein, 9 aa, Homo sapiens
  AACR GENIE Results; TP53_p.L130F; A2301
TYSPAFNKM

SEQ ID NO: 28166 - protein, 9 aa, Homo sapiens
  AACR GENIE Results; TP53_p.L130F; C1402
TYSPAFNKM

SEQ ID NO: 28167 - protein, 8 aa, Homo sapiens
  AACR GENIE Results; TP53_p.L130F; A3303
TYSPAFNK

SEQ ID NO: 28168 - protein, 9 aa, Homo sapiens
  AACR GENIE Results; TP53_p.L130F; C0102
YSPAFNKMF

SEQ ID NO: 28169 - protein, 10 aa, Homo sapiens
  AACR GENIE Results; TP53_p.L130F; C1402
TYSPAFNKMF

SEQ ID NO: 28170 - protein, 9 aa, Homo sapiens
  AACR GENIE Results; TP53_p.L130F; C0202
YSPAFNKMF

SEQ ID NO: 28171 - protein, 10 aa, Homo sapiens
  AACR GENIE Results; TP53_p.L130F; A1101
TCTYSPAFNK

SEQ ID NO: 28172 - protein, 8 aa, Homo sapiens
  AACR GENIE Results; TP53_p.L130F; B0702
SPAFNKMF

SEQ ID NO: 28173 - protein, 9 aa, Homo sapiens
  AACR GENIE Results; TP53_p.L130F; C1203
YSPAFNKMF

SEQ ID NO: 28174 - protein, 10 aa, Homo sapiens
  AACR GENIE Results; TP53_p.L130F; B5701
TYSPAFNKMF

SEQ ID NO: 28175 - protein, 9 aa, Homo sapiens
  AACR GENIE Results; TP53_p.L130F; C0602
YSPAFNKMF

SEQ ID NO: 28176 - protein, 9 aa, Homo sapiens
  AACR GENIE Results; TP53_p.L130F; C1601
YSPAFNKMF

SEQ ID NO: 28177 - protein, 9 aa, Homo sapiens
  AACR GENIE Results; TP53_p.L130F; A3303
TYSPAFNKM

SEQ ID NO: 28178 - protein, 9 aa, Homo sapiens
  AACR GENIE Results; TP53_p.L130R; A0301
CTYSPARNK

SEQ ID NO: 28179 - protein, 9 aa, Homo sapiens
  AACR GENIE Results; TP53_p.L130R; A1101
CTYSPARNK

SEQ ID NO: 28180 - protein, 9 aa, Homo sapiens
  AACR GENIE Results; TP53_p.L130R; A2402
TYSPARNKM

SEQ ID NO: 28181 - protein, 10 aa, Homo sapiens
  AACR GENIE Results; TP53_p.L130R; A2301
TYSPARNKMF

SEQ ID NO: 28182 - protein, 10 aa, Homo sapiens
  AACR GENIE Results; TP53_p.L130R; A2402
TYSPARNKMF

SEQ ID NO: 28183 - protein, 10 aa, Homo sapiens
  AACR GENIE Results; TP53_p.L130R; A0301
TCTYSPARNK

SEQ ID NO: 28184 - protein, 8 aa, Homo sapiens
  AACR GENIE Results; TP53_p.L130R; B0702
SPARNKMF

SEQ ID NO: 28185 - protein, 10 aa, Homo sapiens
  AACR GENIE Results; TP53_p.L130R; A1101
TCTYSPARNK

SEQ ID NO: 28186 - protein, 9 aa, Homo sapiens
  AACR GENIE Results; TP53_p.L130R; C0102
YSPARNKMF

SEQ ID NO: 28187 - protein, 9 aa, Homo sapiens
  AACR GENIE Results; TP53_p.L130V; A1101
CTYSPAVNK

SEQ ID NO: 28188 - protein, 9 aa, Homo sapiens
  AACR GENIE Results; TP53_p.L130V; A0301
CTYSPAVNK

SEQ ID NO: 28189 - protein, 10 aa, Homo sapiens
  AACR GENIE Results; TP53_p.L130V; A2402
TYSPAVNKMF

SEQ ID NO: 28190 - protein, 10 aa, Homo sapiens
  AACR GENIE Results; TP53_p.L130V; A2301
TYSPAVNKMF

SEQ ID NO: 28191 - protein, 9 aa, Homo sapiens
  AACR GENIE Results; TP53_p.L130V; A2402
TYSPAVNKM

SEQ ID NO: 28192 - protein, 9 aa, Homo sapiens
  AACR GENIE Results; TP53_p.L130V; C1402
TYSPAVNKM

SEQ ID NO: 28193 - protein, 9 aa, Homo sapiens
  AACR GENIE Results; TP53_p.L130V; A2301
TYSPAVNKM

SEQ ID NO: 28194 - protein, 9 aa, Homo sapiens
  AACR GENIE Results; TP53_p.L130V; B3901
TYSPAVNKM

SEQ ID NO: 28195 - protein, 9 aa, Homo sapiens
  AACR GENIE Results; TP53_p.L130V; A6801
CTYSPAVNK

SEQ ID NO: 28196 - protein, 9 aa, Homo sapiens
  AACR GENIE Results; TP53_p.L130V; A3303
CTYSPAVNK

SEQ ID NO: 28197 - protein, 8 aa, Homo sapiens
  AACR GENIE Results; TP53_p.L130V; B0702
SPAVNKMF

SEQ ID NO: 28198 - protein, 8 aa, Homo sapiens
  AACR GENIE Results; TP53_p.L130V; A3303
TYSPAVNK

SEQ ID NO: 28199 - protein, 9 aa, Homo sapiens
  AACR GENIE Results; TP53_p.L130V; B0702
TYSPAVNKM

SEQ ID NO: 28200 - protein, 10 aa, Homo sapiens
  AACR GENIE Results; TP53_p.L130V; A1101
TCTYSPAVNK

SEQ ID NO: 28201 - protein, 10 aa, Homo sapiens
  AACR GENIE Results; TP53_p.L130V; B5701
TYSPAVNKMF

SEQ ID NO: 28202 - protein, 8 aa, Homo sapiens
  AACR GENIE Results; TP53_p.L130V; A1101
TYSPAVNK

SEQ ID NO: 28203 - protein, 9 aa, Homo sapiens
  AACR GENIE Results; TP53_p.L130V; C0202
YSPAVNKMF

SEQ ID NO: 28204 - protein, 9 aa, Homo sapiens
  AACR GENIE Results; TP53_p.L130V; C0702
TYSPAVNKM

SEQ ID NO: 28205 - protein, 8 aa, Homo sapiens
  AACR GENIE Results; TP53_p.L130V; B5101
YSPAVNKM

SEQ ID NO: 28206 - protein, 9 aa, Homo sapiens
  AACR GENIE Results; TP53_p.L130V; A3303
TYSPAVNKM

SEQ ID NO: 28207 - protein, 9 aa, Homo sapiens
  AACR GENIE Results; TP53_p.L130V; B5701
YSPAVNKMF

SEQ ID NO: 28208 - protein, 10 aa, Homo sapiens
  AACR GENIE Results; TP53_p.L130V; A0301
TCTYSPAVNK

SEQ ID NO: 28209 - protein, 9 aa, Homo sapiens
  AACR GENIE Results; TP53_p.L130V; B3801
TYSPAVNKM

SEQ ID NO: 28210 - protein, 10 aa, Homo sapiens
  AACR GENIE Results; TP53_p.L130V; C1402
TYSPAVNKMF

SEQ ID NO: 28211 - protein, 9 aa, Homo sapiens
  AACR GENIE Results; TP53_p.L130V; B3501
TYSPAVNKM

SEQ ID NO: 28212 - protein, 9 aa, Homo sapiens
  AACR GENIE Results; TP53_p.L130V; A3101
CTYSPAVNK

SEQ ID NO: 28213 - protein, 8 aa, Homo sapiens
  AACR GENIE Results; TP53_p.L130V; C0102
YSPAVNKM

SEQ ID NO: 28214 - protein, 9 aa, Homo sapiens
  AACR GENIE Results; TP53_p.L130V; C0102
YSPAVNKMF

SEQ ID NO: 28215 - protein, 8 aa, Homo sapiens
  AACR GENIE Results; TP53_p.L130V; B3501
SPAVNKMF

SEQ ID NO: 28216 - protein, 10 aa, Homo sapiens
  AACR GENIE Results; TP53_p.L130V; A0301
CTYSPAVNKM

SEQ ID NO: 28217 - protein, 10 aa, Homo sapiens
  AACR GENIE Results; TP53_p.L130V; A1101
CTYSPAVNKM

SEQ ID NO: 28218 - protein, 9 aa, Homo sapiens
  AACR GENIE Results; TP53_p.L130V; A2301
YSPAVNKMF

SEQ ID NO: 28219 - protein, 8 aa, Homo sapiens
  AACR GENIE Results; TP53_p.L130V; B0801
SPAVNKMF

SEQ ID NO: 28220 - protein, 8 aa, Homo sapiens
  AACR GENIE Results; TP53_p.L145R; B5701
KTCPVQRW

SEQ ID NO: 28221 - protein, 9 aa, Homo sapiens
  AACR GENIE Results; TP53_p.L194F; A0201
GLAPPQHFI

SEQ ID NO: 28222 - protein, 11 aa, Homo sapiens
  AACR GENIE Results; TP53_p.L194F; A0201
GLAPPQHFIRV

SEQ ID NO: 28223 - protein, 10 aa, Homo sapiens
  AACR GENIE Results; TP53_p.L194F; B5101
DGLAPPQHFI

SEQ ID NO: 28224 - protein, 9 aa, Homo sapiens
  AACR GENIE Results; TP53_p.L194F; B5101
APPQHFIRV

SEQ ID NO: 28225 - protein, 9 aa, Homo sapiens
  AACR GENIE Results; TP53_p.L194R; B1302
GLAPPQHRI

SEQ ID NO: 28226 - protein, 9 aa, Homo sapiens
  AACR GENIE Results; TP53_p.L194R; A3303
DGLAPPQHR

SEQ ID NO: 28227 - protein, 10 aa, Homo sapiens
  AACR GENIE Results; TP53_p.L194R; B5101
DGLAPPQHRI

SEQ ID NO: 28228 - protein, 9 aa, Homo sapiens
  AACR GENIE Results; TP53_p.L194R; A0201
GLAPPQHRI

SEQ ID NO: 28229 - protein, 11 aa, Homo sapiens
  AACR GENIE Results; TP53_p.L194R; A6801
DSDGLAPPQHR

SEQ ID NO: 28230 - protein, 11 aa, Homo sapiens
  AACR GENIE Results; TP53_p.L194R; A3303
DSDGLAPPQHR

SEQ ID NO: 28231 - protein, 9 aa, Homo sapiens
  AACR GENIE Results; TP53_p.L194R; B3801
GLAPPQHRI

SEQ ID NO: 28232 - protein, 9 aa, Homo sapiens
  AACR GENIE Results; TP53_p.L257P; B4001
PEDSSGNLL

SEQ ID NO: 28233 - protein, 10 aa, Homo sapiens
  AACR GENIE Results; TP53_p.L257P; B3501
TPEDSSGNLL

SEQ ID NO: 28234 - protein, 9 aa, Homo sapiens
  AACR GENIE Results; TP53_p.L257P; C0802
TPEDSSGNL

SEQ ID NO: 28235 - protein, 9 aa, Homo sapiens
  AACR GENIE Results; TP53_p.L265P; A6801
DSSGNLPGR

SEQ ID NO: 28236 - protein, 10 aa, Homo sapiens
  AACR GENIE Results; TP53_p.L265P; A6801
EDSSGNLPGR

SEQ ID NO: 28237 - protein, 10 aa, Homo sapiens
  AACR GENIE Results; TP53_p.L265P; B0702
SGNLPGRNSF

SEQ ID NO: 28238 - protein, 10 aa, Homo sapiens
  AACR GENIE Results; TP53_p.L265P; B1501
SGNLPGRNSF

SEQ ID NO: 28239 - protein, 9 aa, Homo sapiens
  AACR GENIE Results; TP53_p.L330P; B5101
DGEYFTPQI

SEQ ID NO: 28240 - protein, 8 aa, Homo sapiens
  AACR GENIE Results; TP53_p.L330P; B1801
GEYFTPQI

SEQ ID NO: 28241 - protein, 9 aa, Homo sapiens
  AACR GENIE Results; TP53_p.L344R; B0702
RERNEALEL

SEQ ID NO: 28242 - protein, 9 aa, Homo sapiens
  AACR GENIE Results; TP53_p.L348F; B4001
RELNEAFEL

SEQ ID NO: 28243 - protein, 9 aa, Homo sapiens
  AACR GENIE Results; TP53_p.L348F; A1101
ELNEAFELK

SEQ ID NO: 28244 - protein, 9 aa, Homo sapiens
  AACR GENIE Results; TP53_p.L348F; B4403
RELNEAFEL

SEQ ID NO: 28245 - protein, 10 aa, Homo sapiens
  AACR GENIE Results; TP53_p.M133T; A2402
TYSPALNKTF

SEQ ID NO: 28246 - protein, 10 aa, Homo sapiens
  AACR GENIE Results; TP53_p.M133T; A2301
TYSPALNKTF

SEQ ID NO: 28247 - protein, 8 aa, Homo sapiens
  AACR GENIE Results; TP53_p.M133T; B0702
SPALNKTF

SEQ ID NO: 28248 - protein, 11 aa, Homo sapiens
  AACR GENIE Results; TP53_p.M133T; B0702
SPALNKTFCQL

SEQ ID NO: 28249 - protein, 8 aa, Homo sapiens
  AACR GENIE Results; TP53_p.M133T; B3501
SPALNKTF

SEQ ID NO: 28250 - protein, 10 aa, Homo sapiens
  AACR GENIE Results; TP53_p.M133T; B5701
TYSPALNKTF

SEQ ID NO: 28251 - protein, 9 aa, Homo sapiens
  AACR GENIE Results; TP53_p.M133T; C0102
YSPALNKTF

SEQ ID NO: 28252 - protein, 9 aa, Homo sapiens
  AACR GENIE Results; TP53_p.M133T; B5701
YSPALNKTF

SEQ ID NO: 28253 - protein, 10 aa, Homo sapiens
  AACR GENIE Results; TP53_p.M133T; B4403
TYSPALNKTF

SEQ ID NO: 28254 - protein, 8 aa, Homo sapiens
  AACR GENIE Results; TP53_p.M133T; B0801
SPALNKTF

SEQ ID NO: 28255 - protein, 9 aa, Homo sapiens
  AACR GENIE Results; TP53_p.M133T; C0202
YSPALNKTF

SEQ ID NO: 28256 - protein, 9 aa, Homo sapiens
  AACR GENIE Results; TP53_p.M133T; A2402
YSPALNKTF

SEQ ID NO: 28257 - protein, 10 aa, Homo sapiens
  AACR GENIE Results; TP53_p.M133T; B4402
TYSPALNKTF

SEQ ID NO: 28258 - protein, 10 aa, Homo sapiens
  AACR GENIE Results; TP53_p.M133T; B1501
TYSPALNKTF

SEQ ID NO: 28259 - protein, 10 aa, Homo sapiens
  AACR GENIE Results; TP53_p.M246I; A6801
NSSCMGGINR

SEQ ID NO: 28260 - protein, 9 aa, Homo sapiens
  AACR GENIE Results; TP53_p.M246I; A6801
SSCMGGINR

SEQ ID NO: 28261 - protein, 9 aa, Homo sapiens
  AACR GENIE Results; TP53_p.M246I; A1101
SSCMGGINR

SEQ ID NO: 28262 - protein, 10 aa, Homo sapiens
  AACR GENIE Results; TP53_p.M246V; A6801
NSSCMGGVNR

SEQ ID NO: 28263 - protein, 9 aa, Homo sapiens
  AACR GENIE Results; TP53_p.M246V; A6801
SSCMGGVNR

SEQ ID NO: 28264 - protein, 8 aa, Homo sapiens
  AACR GENIE Results; TP53_p.M246V; A3101
SCMGGVNR

SEQ ID NO: 28265 - protein, 9 aa, Homo sapiens
  AACR GENIE Results; TP53_p.M246V; A3101
SSCMGGVNR

SEQ ID NO: 28266 - protein, 9 aa, Homo sapiens
  AACR GENIE Results; TP53_p.M246V; A3101
SCMGGVNRR

SEQ ID NO: 28267 - protein, 9 aa, Homo sapiens
  AACR GENIE Results; TP53_p.N131del; A2402
TYSPALKMF

SEQ ID NO: 28268 - protein, 9 aa, Homo sapiens
  AACR GENIE Results; TP53_p.N131del; A2301
TYSPALKMF

SEQ ID NO: 28269 - protein, 9 aa, Homo sapiens
  AACR GENIE Results; TP53_p.N131del; C0602
TYSPALKMF

SEQ ID NO: 28270 - protein, 9 aa, Homo sapiens
  AACR GENIE Results; TP53_p.N131del; C1402
TYSPALKMF

SEQ ID NO: 28271 - protein, 8 aa, Homo sapiens
  AACR GENIE Results; TP53_p.N131del; A0301
CTYSPALK

SEQ ID NO: 28272 - protein, 8 aa, Homo sapiens
  AACR GENIE Results; TP53_p.N131del; C1402
TYSPALKM

SEQ ID NO: 28273 - protein, 8 aa, Homo sapiens
  AACR GENIE Results; TP53_p.N131del; B3901
TYSPALKM

SEQ ID NO: 28274 - protein, 9 aa, Homo sapiens
  AACR GENIE Results; TP53_p.N131del; A0301
CTYSPALKM

SEQ ID NO: 28275 - protein, 10 aa, Homo sapiens
  AACR GENIE Results; TP53_p.N131del; A0301
VTCTYSPALK

SEQ ID NO: 28276 - protein, 8 aa, Homo sapiens
  AACR GENIE Results; TP53_p.N131del; A2301
TYSPALKM

SEQ ID NO: 28277 - protein, 10 aa, Homo sapiens
  AACR GENIE Results; TP53_p.N131del; A1101
VTCTYSPALK

SEQ ID NO: 28278 - protein, 8 aa, Homo sapiens
  AACR GENIE Results; TP53_p.N131del; A2601
TYSPALKM

SEQ ID NO: 28279 - protein, 10 aa, Homo sapiens
  AACR GENIE Results; TP53_p.N131I; A2301
TYSPALIKMF

SEQ ID NO: 28280 - protein, 10 aa, Homo sapiens
  AACR GENIE Results; TP53_p.N131I; A2402
TYSPALIKMF

SEQ ID NO: 28281 - protein, 9 aa, Homo sapiens
  AACR GENIE Results; TP53_p.N131I; A0301
CTYSPALIK

SEQ ID NO: 28282 - protein, 9 aa, Homo sapiens
  AACR GENIE Results; TP53_p.N131I; A1101
CTYSPALIK

SEQ ID NO: 28283 - protein, 9 aa, Homo sapiens
  AACR GENIE Results; TP53_p.N131I; A2402
TYSPALIKM

SEQ ID NO: 28284 - protein, 9 aa, Homo sapiens
  AACR GENIE Results; TP53_p.N131I; A2301
TYSPALIKM

SEQ ID NO: 28285 - protein, 9 aa, Homo sapiens
  AACR GENIE Results; TP53_p.N131I; C1402
TYSPALIKM

SEQ ID NO: 28286 - protein, 9 aa, Homo sapiens
  AACR GENIE Results; TP53_p.N131I; C1203
YSPALIKMF

SEQ ID NO: 28287 - protein, 9 aa, Homo sapiens
  AACR GENIE Results; TP53_p.N131I; C0702
TYSPALIKM

SEQ ID NO: 28288 - protein, 9 aa, Homo sapiens
  AACR GENIE Results; TP53_p.N131I; C0602
YSPALIKMF

SEQ ID NO: 28289 - protein, 9 aa, Homo sapiens
  AACR GENIE Results; TP53_p.N131I; A3303
TYSPALIKM

SEQ ID NO: 28290 - protein, 9 aa, Homo sapiens
  AACR GENIE Results; TP53_p.N131I; A2902
TYSPALIKM

SEQ ID NO: 28291 - protein, 8 aa, Homo sapiens
  AACR GENIE Results; TP53_p.N131I; B0702
SPALIKMF

SEQ ID NO: 28292 - protein, 9 aa, Homo sapiens
  AACR GENIE Results; TP53_p.N131I; C0202
YSPALIKMF

SEQ ID NO: 28293 - protein, 8 aa, Homo sapiens
  AACR GENIE Results; TP53_p.N131I; B0801
SPALIKMF

SEQ ID NO: 28294 - protein, 9 aa, Homo sapiens
  AACR GENIE Results; TP53_p.N131I; C0602
TYSPALIKM

SEQ ID NO: 28295 - protein, 9 aa, Homo sapiens
  AACR GENIE Results; TP53_p.N131I; B3801
TYSPALIKM

SEQ ID NO: 28296 - protein, 9 aa, Homo sapiens
  AACR GENIE Results; TP53_p.N239Tfs*8; A2402
NYMCTVPAW

SEQ ID NO: 28297 - protein, 9 aa, Homo sapiens
  AACR GENIE Results; TP53_p.N239Tfs*8; A2301
NYMCTVPAW

SEQ ID NO: 28298 - protein, 9 aa, Homo sapiens
  AACR GENIE Results; TP53_p.N247I; C0602
IRRPILTII

SEQ ID NO: 28299 - protein, 9 aa, Homo sapiens
  AACR GENIE Results; TP53_p.N247I; A1101
SCMGGMIRR

SEQ ID NO: 28300 - protein, 9 aa, Homo sapiens
  AACR GENIE Results; TP53_p.N310Tfs*35; A6801
TPAPLPSQR

SEQ ID NO: 28301 - protein, 10 aa, Homo sapiens
  AACR GENIE Results; TP53_p.N310Tfs*35; A6801
TTPAPLPSQR

SEQ ID NO: 28302 - protein, 10 aa, Homo sapiens
  AACR GENIE Results; TP53_p.N310Tfs*35; B0702
SPFRSVGVSA

SEQ ID NO: 28303 - protein, 9 aa, Homo sapiens
  AACR GENIE Results; TP53_p.N310Tfs*35; C0102
ALPTTPAPL

SEQ ID NO: 28304 - protein, 9 aa, Homo sapiens
  AACR GENIE Results; TP53_p.N310Tfs*35; C0102
ISPFRSVGV

SEQ ID NO: 28305 - protein, 9 aa, Homo sapiens
  AACR GENIE Results; TP53_p.N310Tfs*35; A3101
RSVGVSASR

SEQ ID NO: 28306 - protein, 8 aa, Homo sapiens
  AACR GENIE Results; TP53_p.N310Tfs*35; B5101
SPFRSVGV

SEQ ID NO: 28307 - protein, 8 aa, Homo sapiens
  AACR GENIE Results; TP53_p.N310Tfs*35; B0702
SPFRSVGV

SEQ ID NO: 28308 - protein, 9 aa, Homo sapiens
  AACR GENIE Results; TP53_p.N310Tfs*35; A6801
RSVGVSASR

SEQ ID NO: 28309 - protein, 9 aa, Homo sapiens
  AACR GENIE Results; TP53_p.N310Tfs*35; B5701
RSVGVSASR

SEQ ID NO: 28310 - protein, 8 aa, Homo sapiens
  AACR GENIE Results; TP53_p.N310Tfs*35; B0801
SPFRSVGV

SEQ ID NO: 28311 - protein, 11 aa, Homo sapiens
  AACR GENIE Results; TP53_p.N310Tfs*35; A0201
ALPTTPAPLPS

SEQ ID NO: 28312 - protein, 8 aa, Homo sapiens
  AACR GENIE Results; TP53_p.N310Tfs*35; B1302
SPFRSVGV

SEQ ID NO: 28313 - protein, 9 aa, Homo sapiens
  AACR GENIE Results; TP53_p.N310Tfs*35; A1101
RSVGVSASR

SEQ ID NO: 28314 - protein, 9 aa, Homo sapiens
  AACR GENIE Results; TP53_p.N310Tfs*35; A0301
RSVGVSASR

SEQ ID NO: 28315 - protein, 9 aa, Homo sapiens
  AACR GENIE Results; TP53_p.N310Tfs*35; A0201
ALPTTPAPL

SEQ ID NO: 28316 - protein, 8 aa, Homo sapiens
  AACR GENIE Results; TP53_p.N310Tfs*35; A3101
SVGVSASR

SEQ ID NO: 28317 - protein, 8 aa, Homo sapiens
  AACR GENIE Results; TP53_p.N310Tfs*35; B3501
LPTTPAPL

SEQ ID NO: 28318 - protein, 10 aa, Homo sapiens
  AACR GENIE Results; TP53_p.P151H; A3101
STHPPGTRVR

SEQ ID NO: 28319 - protein, 10 aa, Homo sapiens
  AACR GENIE Results; TP53_p.P151H; A6801
STHPPGTRVR

SEQ ID NO: 28320 - protein, 10 aa, Homo sapiens
  AACR GENIE Results; TP53_p.P151H; A3303
STHPPGTRVR

SEQ ID NO: 28321 - protein, 9 aa, Homo sapiens
  AACR GENIE Results; TP53_p.P151H; A3001
STHPPGTRV

SEQ ID NO: 28322 - protein, 10 aa, Homo sapiens
  AACR GENIE Results; TP53_p.P151H; A1101
STHPPGTRVR

SEQ ID NO: 28323 - protein, 8 aa, Homo sapiens
  AACR GENIE Results; TP53_p.P151H; A3101
STHPPGTR

SEQ ID NO: 28324 - protein, 9 aa, Homo sapiens
  AACR GENIE Results; TP53_p.P151H; A6801
DSTHPPGTR

SEQ ID NO: 28325 - protein, 8 aa, Homo sapiens
  AACR GENIE Results; TP53_p.P151H; A3303
STHPPGTR

SEQ ID NO: 28326 - protein, 9 aa, Homo sapiens
  AACR GENIE Results; TP53_p.P151H; A3303
DSTHPPGTR

SEQ ID NO: 28327 - protein, 9 aa, Homo sapiens
  AACR GENIE Results; TP53_p.P151H; C1502
STHPPGTRV

SEQ ID NO: 28328 - protein, 11 aa, Homo sapiens
  AACR GENIE Results; TP53_p.P151H; A6801
DSTHPPGTRVR

SEQ ID NO: 28329 - protein, 10 aa, Homo sapiens
  AACR GENIE Results; TP53_p.P151H; A0301
STHPPGTRVR

SEQ ID NO: 28330 - protein, 9 aa, Homo sapiens
  AACR GENIE Results; TP53_p.P151H; B0702
STHPPGTRV

SEQ ID NO: 28331 - protein, 9 aa, Homo sapiens
  AACR GENIE Results; TP53_p.P151R; B0702
STRPPGTRV

SEQ ID NO: 28332 - protein, 10 aa, Homo sapiens
  AACR GENIE Results; TP53_p.P151R; B0702
RPPGTRVRAM

SEQ ID NO: 28333 - protein, 10 aa, Homo sapiens
  AACR GENIE Results; TP53_p.P151R; A0301
STRPPGTRVR

SEQ ID NO: 28334 - protein, 9 aa, Homo sapiens
  AACR GENIE Results; TP53_p.P151R; C0602
TRPPGTRVR

SEQ ID NO: 28335 - protein, 10 aa, Homo sapiens
  AACR GENIE Results; TP53_p.P151S; A6801
STSPPGTRVR

SEQ ID NO: 28336 - protein, 10 aa, Homo sapiens
  AACR GENIE Results; TP53_p.P151S; B0702
SPPGTRVRAM

SEQ ID NO: 28337 - protein, 9 aa, Homo sapiens
  AACR GENIE Results; TP53_p.P151S; A6802
STSPPGTRV

SEQ ID NO: 28338 - protein, 10 aa, Homo sapiens
  AACR GENIE Results; TP53_p.P151S; A1101
STSPPGTRVR

SEQ ID NO: 28339 - protein, 11 aa, Homo sapiens
  AACR GENIE Results; TP53_p.P151S; A6801
DSTSPPGTRVR

SEQ ID NO: 28340 - protein, 8 aa, Homo sapiens
  AACR GENIE Results; TP53_p.P151S; B5101
TSPPGTRV

SEQ ID NO: 28341 - protein, 9 aa, Homo sapiens
  AACR GENIE Results; TP53_p.P151S; A6801
TSPPGTRVR

SEQ ID NO: 28342 - protein, 10 aa, Homo sapiens
  AACR GENIE Results; TP53_p.P151S; A3303
STSPPGTRVR

SEQ ID NO: 28343 - protein, 10 aa, Homo sapiens
  AACR GENIE Results; TP53_p.P151S; A3101
STSPPGTRVR

SEQ ID NO: 28344 - protein, 10 aa, Homo sapiens
  AACR GENIE Results; TP53_p.P151S; A6802
DSTSPPGTRV

SEQ ID NO: 28345 - protein, 9 aa, Homo sapiens
  AACR GENIE Results; TP53_p.P151S; A1101
STSPPGTRV

SEQ ID NO: 28346 - protein, 9 aa, Homo sapiens
  AACR GENIE Results; TP53_p.P151S; A3303
TSPPGTRVR

SEQ ID NO: 28347 - protein, 9 aa, Homo sapiens
  AACR GENIE Results; TP53_p.P151S; A6801
DSTSPPGTR

SEQ ID NO: 28348 - protein, 9 aa, Homo sapiens
  AACR GENIE Results; TP53_p.P151S; C1502
STSPPGTRV

SEQ ID NO: 28349 - protein, 9 aa, Homo sapiens
  AACR GENIE Results; TP53_p.P151S; A3303
DSTSPPGTR

SEQ ID NO: 28350 - protein, 9 aa, Homo sapiens
  AACR GENIE Results; TP53_p.P151S; B5801
STSPPGTRV

SEQ ID NO: 28351 - protein, 10 aa, Homo sapiens
  AACR GENIE Results; TP53_p.P151S; B5701
STSPPGTRVR

SEQ ID NO: 28352 - protein, 11 aa, Homo sapiens
  AACR GENIE Results; TP53_p.P151S; A6802
STSPPGTRVRA

SEQ ID NO: 28353 - protein, 10 aa, Homo sapiens
  AACR GENIE Results; TP53_p.P151S; B2702
VDSTSPPGTR

SEQ ID NO: 28354 - protein, 9 aa, Homo sapiens
  AACR GENIE Results; TP53_p.P151S; B1302
STSPPGTRV

SEQ ID NO: 28355 - protein, 11 aa, Homo sapiens
  AACR GENIE Results; TP53_p.P151S; A3303
DSTSPPGTRVR

SEQ ID NO: 28356 - protein, 9 aa, Homo sapiens
  AACR GENIE Results; TP53_p.P151T; A6801
TTPPGTRVR

SEQ ID NO: 28357 - protein, 10 aa, Homo sapiens
  AACR GENIE Results; TP53_p.P151T; A6801
STTPPGTRVR

SEQ ID NO: 28358 - protein, 11 aa, Homo sapiens
  AACR GENIE Results; TP53_p.P151T; A6801
DSTTPPGTRVR

SEQ ID NO: 28359 - protein, 9 aa, Homo sapiens
  AACR GENIE Results; TP53_p.P151T; A6801
DSTTPPGTR

SEQ ID NO: 28360 - protein, 10 aa, Homo sapiens
  AACR GENIE Results; TP53_p.P151T; B0702
TPPGTRVRAM

SEQ ID NO: 28361 - protein, 10 aa, Homo sapiens
  AACR GENIE Results; TP53_p.P151T; A1101
STTPPGTRVR

SEQ ID NO: 28362 - protein, 9 aa, Homo sapiens
  AACR GENIE Results; TP53_p.P151T; A1101
TTPPGTRVR

SEQ ID NO: 28363 - protein, 8 aa, Homo sapiens
  AACR GENIE Results; TP53_p.P151T; B5101
TTPPGTRV

SEQ ID NO: 28364 - protein, 10 aa, Homo sapiens
  AACR GENIE Results; TP53_p.P151T; A6801
VDSTTPPGTR

SEQ ID NO: 28365 - protein, 9 aa, Homo sapiens
  AACR GENIE Results; TP53_p.P152Afs*14; B0702
APWPSTSSH

SEQ ID NO: 28366 - protein, 9 aa, Homo sapiens
  AACR GENIE Results; TP53_p.P152Afs*14; B3501
APWPSTSSH

SEQ ID NO: 28367 - protein, 11 aa, Homo sapiens
  AACR GENIE Results; TP53_p.P152Afs*14; B3501
APWPSTSSHST

SEQ ID NO: 28368 - protein, 11 aa, Homo sapiens
  AACR GENIE Results; TP53_p.P152Afs*14; B0702
APWPSTSSHST

SEQ ID NO: 28369 - protein, 10 aa, Homo sapiens
  AACR GENIE Results; TP53_p.P152L; A6802
DSTPLPGTRV

SEQ ID NO: 28370 - protein, 8 aa, Homo sapiens
  AACR GENIE Results; TP53_p.P152L; B5101
TPLPGTRV

SEQ ID NO: 28371 - protein, 8 aa, Homo sapiens
  AACR GENIE Results; TP53_p.P152L; B5501
TPLPGTRV

SEQ ID NO: 28372 - protein, 9 aa, Homo sapiens
  AACR GENIE Results; TP53_p.P152L; A6801
DSTPLPGTR

SEQ ID NO: 28373 - protein, 10 aa, Homo sapiens
  AACR GENIE Results; TP53_p.P152L; B5501
TPLPGTRVRA

SEQ ID NO: 28374 - protein, 9 aa, Homo sapiens
  AACR GENIE Results; TP53_p.P152L; A3301
DSTPLPGTR

SEQ ID NO: 28375 - protein, 9 aa, Homo sapiens
  AACR GENIE Results; TP53_p.P152L; A3303
DSTPLPGTR

SEQ ID NO: 28376 - protein, 8 aa, Homo sapiens
  AACR GENIE Results; TP53_p.P152L; B0702
TPLPGTRV

SEQ ID NO: 28377 - protein, 11 aa, Homo sapiens
  AACR GENIE Results; TP53_p.P152L; A6801
DSTPLPGTRVR

SEQ ID NO: 28378 - protein, 10 aa, Homo sapiens
  AACR GENIE Results; TP53_p.P152L; A6801
STPLPGTRVR

SEQ ID NO: 28379 - protein, 10 aa, Homo sapiens
  AACR GENIE Results; TP53_p.P152L; A3303
STPLPGTRVR

SEQ ID NO: 28380 - protein, 10 aa, Homo sapiens
  AACR GENIE Results; TP53_p.P152L; A1101
STPLPGTRVR

SEQ ID NO: 28381 - protein, 9 aa, Homo sapiens
  AACR GENIE Results; TP53_p.P152L; B0801
LPGTRVRAM

SEQ ID NO: 28382 - protein, 9 aa, Homo sapiens
  AACR GENIE Results; TP53_p.P152L; A3303
TPLPGTRVR

SEQ ID NO: 28383 - protein, 9 aa, Homo sapiens
  AACR GENIE Results; TP53_p.P152L; B0702
LPGTRVRAM

SEQ ID NO: 28384 - protein, 10 aa, Homo sapiens
  AACR GENIE Results; TP53_p.P152L; A6801
DSTPLPGTRV

SEQ ID NO: 28385 - protein, 10 aa, Homo sapiens
  AACR GENIE Results; TP53_p.P152L; B2702
VDSTPLPGTR

SEQ ID NO: 28386 - protein, 10 aa, Homo sapiens
  AACR GENIE Results; TP53_p.P152L; A3101
STPLPGTRVR

SEQ ID NO: 28387 - protein, 9 aa, Homo sapiens
  AACR GENIE Results; TP53_p.P152L; A6802
STPLPGTRV

SEQ ID NO: 28388 - protein, 9 aa, Homo sapiens
  AACR GENIE Results; TP53_p.P152L; A1101
STPLPGTRV

SEQ ID NO: 28389 - protein, 9 aa, Homo sapiens
  AACR GENIE Results; TP53_p.P152L; B5501
TPLPGTRVR

SEQ ID NO: 28390 - protein, 11 aa, Homo sapiens
  AACR GENIE Results; TP53_p.P152L; A3301
DSTPLPGTRVR

SEQ ID NO: 28391 - protein, 9 aa, Homo sapiens
  AACR GENIE Results; TP53_p.P152Rfs*18; B5501
TPRPAPASA

SEQ ID NO: 28392 - protein, 9 aa, Homo sapiens
  AACR GENIE Results; TP53_p.P152Rfs*18; B5502
TPRPAPASA

SEQ ID NO: 28393 - protein, 9 aa, Homo sapiens
  AACR GENIE Results; TP53_p.P152Rfs*18; B0702
TPRPAPASA

SEQ ID NO: 28394 - protein, 11 aa, Homo sapiens
  AACR GENIE Results; TP53_p.P152Rfs*18; B5502
APWPSTSSHST

SEQ ID NO: 28395 - protein, 9 aa, Homo sapiens
  AACR GENIE Results; TP53_p.P152Rfs*18; B0702
APWPSTSSH

SEQ ID NO: 28396 - protein, 9 aa, Homo sapiens
  AACR GENIE Results; TP53_p.P152Rfs*18; B3906
TPRPAPASA

SEQ ID NO: 28397 - protein, 10 aa, Homo sapiens
  AACR GENIE Results; TP53_p.P152Rfs*18; B0702
TPRPAPASAP

SEQ ID NO: 28398 - protein, 10 aa, Homo sapiens
  AACR GENIE Results; TP53_p.P152Rfs*18; B5501
TPRPAPASAP

SEQ ID NO: 28399 - protein, 9 aa, Homo sapiens
  AACR GENIE Results; TP53_p.P152Rfs*18; B3501
APWPSTSSH

SEQ ID NO: 28400 - protein, 9 aa, Homo sapiens
  AACR GENIE Results; TP53_p.P152Rfs*18; A3001
VDSTPRPAP

SEQ ID NO: 28401 - protein, 9 aa, Homo sapiens
  AACR GENIE Results; TP53_p.P152Rfs*18; B5001
VDSTPRPAP

SEQ ID NO: 28402 - protein, 11 aa, Homo sapiens
  AACR GENIE Results; TP53_p.P152Rfs*18; B3501
APWPSTSSHST

SEQ ID NO: 28403 - protein, 11 aa, Homo sapiens
  AACR GENIE Results; TP53_p.P152Rfs*18; B0702
TPRPAPASAPW

SEQ ID NO: 28404 - protein, 9 aa, Homo sapiens
  AACR GENIE Results; TP53_p.P153Afs*28; B3801
AHDGGCEAL

SEQ ID NO: 28405 - protein, 9 aa, Homo sapiens
  AACR GENIE Results; TP53_p.P153Afs*28; B3901
AHDGGCEAL

SEQ ID NO: 28406 - protein, 9 aa, Homo sapiens
  AACR GENIE Results; TP53_p.P153Afs*28; A3303
STPPARHPR

SEQ ID NO: 28407 - protein, 9 aa, Homo sapiens
  AACR GENIE Results; TP53_p.P153Afs*28; A3101
STPPARHPR

SEQ ID NO: 28408 - protein, 10 aa, Homo sapiens
  AACR GENIE Results; TP53_p.P153Afs*28; A3303
DSTPPARHPR

SEQ ID NO: 28409 - protein, 10 aa, Homo sapiens
  AACR GENIE Results; TP53_p.P153Afs*28; A6801
DSTPPARHPR

SEQ ID NO: 28410 - protein, 9 aa, Homo sapiens
  AACR GENIE Results; TP53_p.P153Afs*28; A1101
STPPARHPR

SEQ ID NO: 28411 - protein, 10 aa, Homo sapiens
  AACR GENIE Results; TP53_p.P153Afs*28; B3503
TAHDGGCEAL

SEQ ID NO: 28412 - protein, 9 aa, Homo sapiens
  AACR GENIE Results; TP53_p.P190L; B1302
GLALPQHLI

SEQ ID NO: 28413 - protein, 9 aa, Homo sapiens
  AACR GENIE Results; TP53_p.P190L; C0802
CSDSDGLAL

SEQ ID NO: 28414 - protein, 8 aa, Homo sapiens
  AACR GENIE Results; TP53_p.P190L; B5101
LPQHLIRV

SEQ ID NO: 28415 - protein, 11 aa, Homo sapiens
  AACR GENIE Results; TP53_p.P190L; A0201
GLALPQHLIRV

SEQ ID NO: 28416 - protein, 9 aa, Homo sapiens
  AACR GENIE Results; TP53_p.P190L; A0201
ALPQHLIRV

SEQ ID NO: 28417 - protein, 9 aa, Homo sapiens
  AACR GENIE Results; TP53_p.P190L; A0201
GLALPQHLI

SEQ ID NO: 28418 - protein, 10 aa, Homo sapiens
  AACR GENIE Results; TP53_p.P190L; B5101
DGLALPQHLI

SEQ ID NO: 28419 - protein, 8 aa, Homo sapiens
  AACR GENIE Results; TP53_p.P190L; B5501
LPQHLIRV

SEQ ID NO: 28420 - protein, 11 aa, Homo sapiens
  AACR GENIE Results; TP53_p.P190T; A0201
GLATPQHLIRV

SEQ ID NO: 28421 - protein, 9 aa, Homo sapiens
  AACR GENIE Results; TP53_p.P190T; A0201
GLATPQHLI

SEQ ID NO: 28422 - protein, 10 aa, Homo sapiens
  AACR GENIE Results; TP53_p.P190T; B5101
DGLATPQHLI

SEQ ID NO: 28423 - protein, 8 aa, Homo sapiens
  AACR GENIE Results; TP53_p.P190T; B5101
TPQHLIRV

SEQ ID NO: 28424 - protein, 9 aa, Homo sapiens
  AACR GENIE Results; TP53_p.P191del; B5101
DGLAPQHLI

SEQ ID NO: 28425 - protein, 10 aa, Homo sapiens
  AACR GENIE Results; TP53_p.P191del; A0201
GLAPQHLIRV

SEQ ID NO: 28426 - protein, 8 aa, Homo sapiens
  AACR GENIE Results; TP53_p.P191del; B5501
APQHLIRV

SEQ ID NO: 28427 - protein, 8 aa, Homo sapiens
  AACR GENIE Results; TP53_p.P191del; B5101
DGLAPQHL

SEQ ID NO: 28428 - protein, 8 aa, Homo sapiens
  AACR GENIE Results; TP53_p.P191del; B1302
GLAPQHLI

SEQ ID NO: 28429 - protein, 10 aa, Homo sapiens
  AACR GENIE Results; TP53_p.P191del; B5501
APQHLIRVEG

SEQ ID NO: 28430 - protein, 9 aa, Homo sapiens
  AACR GENIE Results; TP53_p.P191del; B4002
SDGLAPQHL

SEQ ID NO: 28431 - protein, 9 aa, Homo sapiens
  AACR GENIE Results; TP53_p.P191del; A0301
GLAPQHLIR

SEQ ID NO: 28432 - protein, 9 aa, Homo sapiens
  AACR GENIE Results; TP53_p.P250L; A0201
RLILTIITL

SEQ ID NO: 28433 - protein, 9 aa, Homo sapiens
  AACR GENIE Results; TP53_p.P36Rfs*8; A0301
NVLSPLRPK

SEQ ID NO: 28434 - protein, 9 aa, Homo sapiens
  AACR GENIE Results; TP53_p.P36Rfs*8; A3303
ENNVLSPLR

SEQ ID NO: 28435 - protein, 9 aa, Homo sapiens
  AACR GENIE Results; TP53_p.P36Rfs*8; A1101
NVLSPLRPK

SEQ ID NO: 28436 - protein, 11 aa, Homo sapiens
  AACR GENIE Results; TP53_p.P36Rfs*8; B2702
LPENNVLSPLR

SEQ ID NO: 28437 - protein, 8 aa, Homo sapiens
  AACR GENIE Results; TP53_p.P36Rfs*8; A0301
VLSPLRPK

SEQ ID NO: 28438 - protein, 9 aa, Homo sapiens
  AACR GENIE Results; TP53_p.P36Rfs*8; A3301
ENNVLSPLR

SEQ ID NO: 28439 - protein, 10 aa, Homo sapiens
  AACR GENIE Results; TP53_p.P36Rfs*8; B5701
VLSPLRPKQW

SEQ ID NO: 28440 - protein, 9 aa, Homo sapiens
  AACR GENIE Results; TP53_p.P4L; B4901
EELQSDPSV

SEQ ID NO: 28441 - protein, 9 aa, Homo sapiens
  AACR GENIE Results; TP53_p.P4L; A3001
EELQSDPSV

SEQ ID NO: 28442 - protein, 9 aa, Homo sapiens
  AACR GENIE Results; TP53_p.P75Lfs*48; C0303
SCILGQPSL

SEQ ID NO: 28443 - protein, 9 aa, Homo sapiens
  AACR GENIE Results; TP53_p.P75Lfs*48; C0304
SCILGQPSL

SEQ ID NO: 28444 - protein, 9 aa, Homo sapiens
  AACR GENIE Results; TP53_p.P75Lfs*48; B1501
SCILGQPSL

SEQ ID NO: 28445 - protein, 9 aa, Homo sapiens
  AACR GENIE Results; TP53_p.P75Lfs*48; B0702
LPRKPTRAA

SEQ ID NO: 28446 - protein, 9 aa, Homo sapiens
  AACR GENIE Results; TP53_p.P75Lfs*48; B0702
SCILGQPSL

SEQ ID NO: 28447 - protein, 10 aa, Homo sapiens
  AACR GENIE Results; TP53_p.P75Lfs*48; A1101
ASCILGQPSL

SEQ ID NO: 28448 - protein, 9 aa, Homo sapiens
  AACR GENIE Results; TP53_p.P75Lfs*48; A0201
SCILGQPSL

SEQ ID NO: 28449 - protein, 9 aa, Homo sapiens
  AACR GENIE Results; TP53_p.P75Lfs*48; C1601
SCILGQPSL

SEQ ID NO: 28450 - protein, 9 aa, Homo sapiens
  AACR GENIE Results; TP53_p.P75Lfs*48; B0801
SCILGQPSL

SEQ ID NO: 28451 - protein, 11 aa, Homo sapiens
  AACR GENIE Results; TP53_p.P75Lfs*48; B0702
LPRKPTRAATV

SEQ ID NO: 28452 - protein, 9 aa, Homo sapiens
  AACR GENIE Results; TP53_p.P75Lfs*48; B4001
SCILGQPSL

SEQ ID NO: 28453 - protein, 9 aa, Homo sapiens
  AACR GENIE Results; TP53_p.P75Lfs*48; B3501
SCILGQPSL

SEQ ID NO: 28454 - protein, 8 aa, Homo sapiens
  AACR GENIE Results; TP53_p.P75Lfs*48; B5701
RAATVSVW

SEQ ID NO: 28455 - protein, 9 aa, Homo sapiens
  AACR GENIE Results; TP53_p.P75Lfs*48; A0301
ALHQQLLHR

SEQ ID NO: 28456 - protein, 9 aa, Homo sapiens
  AACR GENIE Results; TP53_p.P85Lfs*38; C0304
SCILGQPSL

SEQ ID NO: 28457 - protein, 9 aa, Homo sapiens
  AACR GENIE Results; TP53_p.P85Lfs*38; B1501
SCILGQPSL

SEQ ID NO: 28458 - protein, 9 aa, Homo sapiens
  AACR GENIE Results; TP53_p.P85Lfs*38; B0702
LPRKPTRAA

SEQ ID NO: 28459 - protein, 9 aa, Homo sapiens
  AACR GENIE Results; TP53_p.P85Lfs*38; B0702
SCILGQPSL

SEQ ID NO: 28460 - protein, 10 aa, Homo sapiens
  AACR GENIE Results; TP53_p.P85Lfs*38; A1101
ASCILGQPSL

SEQ ID NO: 28461 - protein, 9 aa, Homo sapiens
  AACR GENIE Results; TP53_p.P85Lfs*38; A0201
SCILGQPSL

SEQ ID NO: 28462 - protein, 9 aa, Homo sapiens
  AACR GENIE Results; TP53_p.P85Lfs*38; B0801
SCILGQPSL

SEQ ID NO: 28463 - protein, 11 aa, Homo sapiens
  AACR GENIE Results; TP53_p.P85Lfs*38; B0702
LPRKPTRAATV

SEQ ID NO: 28464 - protein, 9 aa, Homo sapiens
  AACR GENIE Results; TP53_p.P85Lfs*38; B0702
QPPPGPCHL

SEQ ID NO: 28465 - protein, 9 aa, Homo sapiens
  AACR GENIE Results; TP53_p.P85Lfs*38; B3501
SCILGQPSL

SEQ ID NO: 28466 - protein, 9 aa, Homo sapiens
  AACR GENIE Results; TP53_p.P85Lfs*38; B1501
HQPPPGPCH

SEQ ID NO: 28467 - protein, 9 aa, Homo sapiens
  AACR GENIE Results; TP53_p.P98Lfs*25; C0304
SCILGQPSL

SEQ ID NO: 28468 - protein, 9 aa, Homo sapiens
  AACR GENIE Results; TP53_p.P98Lfs*25; B0702
SCILGQPSL

SEQ ID NO: 28469 - protein, 9 aa, Homo sapiens
  AACR GENIE Results; TP53_p.P98Lfs*25; B0702
LPRKPTRAA

SEQ ID NO: 28470 - protein, 8 aa, Homo sapiens
  AACR GENIE Results; TP53_p.P98Lfs*25; A1101
SSSVLPRK

SEQ ID NO: 28471 - protein, 10 aa, Homo sapiens
  AACR GENIE Results; TP53_p.P98Lfs*25; A1101
ASCILGQPSL

SEQ ID NO: 28472 - protein, 9 aa, Homo sapiens
  AACR GENIE Results; TP53_p.P98Lfs*25; A0201
SCILGQPSL

SEQ ID NO: 28473 - protein, 9 aa, Homo sapiens
  AACR GENIE Results; TP53_p.P98Lfs*25; B0801
SCILGQPSL

SEQ ID NO: 28474 - protein, 9 aa, Homo sapiens
  AACR GENIE Results; TP53_p.P98Lfs*25; B3501
SCILGQPSL

SEQ ID NO: 28475 - protein, 11 aa, Homo sapiens
  AACR GENIE Results; TP53_p.P98Lfs*25; B0702
LPRKPTRAATV

SEQ ID NO: 28476 - protein, 9 aa, Homo sapiens
  AACR GENIE Results; TP53_p.Q136E; B4901
CELAKTCPV

SEQ ID NO: 28477 - protein, 9 aa, Homo sapiens
  AACR GENIE Results; TP53_p.R110L; C1402
TYQGSYGFL

SEQ ID NO: 28478 - protein, 11 aa, Homo sapiens
  AACR GENIE Results; TP53_p.R110L; B5701
KTYQGSYGFLL

SEQ ID NO: 28479 - protein, 10 aa, Homo sapiens
  AACR GENIE Results; TP53_p.R110L; A2301
TYQGSYGFLL

SEQ ID NO: 28480 - protein, 10 aa, Homo sapiens
  AACR GENIE Results; TP53_p.R110L; A0301
GSYGFLLGFL

SEQ ID NO: 28481 - protein, 11 aa, Homo sapiens
  AACR GENIE Results; TP53_p.R110L; A3101
KTYQGSYGFLL

SEQ ID NO: 28482 - protein, 9 aa, Homo sapiens
  AACR GENIE Results; TP53_p.R110P; A2902
GSYGFPLGF

SEQ ID NO: 28483 - protein, 9 aa, Homo sapiens
  AACR GENIE Results; TP53_p.R110P; A1101
GSYGFPLGF

SEQ ID NO: 28484 - protein, 8 aa, Homo sapiens
  AACR GENIE Results; TP53_p.R110P; A2402
SYGFPLGF

SEQ ID NO: 28485 - protein, 9 aa, Homo sapiens
  AACR GENIE Results; TP53_p.R110P; C1203
GSYGFPLGF

SEQ ID NO: 28486 - protein, 9 aa, Homo sapiens
  AACR GENIE Results; TP53_p.R110P; B5701
GSYGFPLGF

SEQ ID NO: 28487 - protein, 9 aa, Homo sapiens
  AACR GENIE Results; TP53_p.R110P; B1501
GSYGFPLGF

SEQ ID NO: 28488 - protein, 9 aa, Homo sapiens
  AACR GENIE Results; TP53_p.R110P; A0301
GSYGFPLGF

SEQ ID NO: 28489 - protein, 10 aa, Homo sapiens
  AACR GENIE Results; TP53_p.R110P; A0301
KTYQGSYGFP

SEQ ID NO: 28490 - protein, 9 aa, Homo sapiens
  AACR GENIE Results; TP53_p.R156P; B3501
TPVRAMAIY

SEQ ID NO: 28491 - protein, 10 aa, Homo sapiens
  AACR GENIE Results; TP53_p.R156P; A6801
STPPPGTPVR

SEQ ID NO: 28492 - protein, 9 aa, Homo sapiens
  AACR GENIE Results; TP53_p.R156P; A6801
TPPPGTPVR

SEQ ID NO: 28493 - protein, 11 aa, Homo sapiens
  AACR GENIE Results; TP53_p.R156P; A6801
DSTPPPGTPVR

SEQ ID NO: 28494 - protein, 8 aa, Homo sapiens
  AACR GENIE Results; TP53_p.R156P; B5101
TPPPGTPV

SEQ ID NO: 28495 - protein, 10 aa, Homo sapiens
  AACR GENIE Results; TP53_p.R156P; A1101
STPPPGTPVR

SEQ ID NO: 28496 - protein, 11 aa, Homo sapiens
  AACR GENIE Results; TP53_p.R156P; B3501
TPPPGTPVRAM

SEQ ID NO: 28497 - protein, 8 aa, Homo sapiens
  AACR GENIE Results; TP53_p.R156P; B5101
TPVRAMAI

SEQ ID NO: 28498 - protein, 9 aa, Homo sapiens
  AACR GENIE Results; TP53_p.R156P; C0102
STPPPGTPV

SEQ ID NO: 28499 - protein, 9 aa, Homo sapiens
  AACR GENIE Results; TP53_p.R156P; B5101
TPPPGTPVR

SEQ ID NO: 28500 - protein, 9 aa, Homo sapiens
  AACR GENIE Results; TP53_p.R156P; A2601
STPPPGTPV

SEQ ID NO: 28501 - protein, 8 aa, Homo sapiens
  AACR GENIE Results; TP53_p.R156P; A6801
TPPPGTPV

SEQ ID NO: 28502 - protein, 9 aa, Homo sapiens
  AACR GENIE Results; TP53_p.R156P; B5101
STPPPGTPV

SEQ ID NO: 28503 - protein, 11 aa, Homo sapiens
  AACR GENIE Results; TP53_p.R156P; B0702
TPPPGTPVRAM

SEQ ID NO: 28504 - protein, 9 aa, Homo sapiens
  AACR GENIE Results; TP53_p.R156P; B3501
TPPPGTPVR

SEQ ID NO: 28505 - protein, 9 aa, Homo sapiens
  AACR GENIE Results; TP53_p.R156P; B0702
STPPPGTPV

SEQ ID NO: 28506 - protein, 9 aa, Homo sapiens
  AACR GENIE Results; TP53_p.R156P; C0304
STPPPGTPV

SEQ ID NO: 28507 - protein, 9 aa, Homo sapiens
  AACR GENIE Results; TP53_p.R156P; C0303
STPPPGTPV

SEQ ID NO: 28508 - protein, 11 aa, Homo sapiens
  AACR GENIE Results; TP53_p.R156P; A1101
STPPPGTPVRA

SEQ ID NO: 28509 - protein, 9 aa, Homo sapiens
  AACR GENIE Results; TP53_p.R156P; A6801
STPPPGTPV

SEQ ID NO: 28510 - protein, 9 aa, Homo sapiens
  AACR GENIE Results; TP53_p.R158C; A0301
RVCAMAIYK

SEQ ID NO: 28511 - protein, 9 aa, Homo sapiens
  AACR GENIE Results; TP53_p.R158C; A1101
RVCAMAIYK

SEQ ID NO: 28512 - protein, 9 aa, Homo sapiens
  AACR GENIE Results; TP53_p.R158G; A0301
RVGAMAIYK

SEQ ID NO: 28513 - protein, 9 aa, Homo sapiens
  AACR GENIE Results; TP53_p.R158G; A1101
RVGAMAIYK

SEQ ID NO: 28514 - protein, 11 aa, Homo sapiens
  AACR GENIE Results; TP53_p.R158G; A0301
GTRVGAMAIYK

SEQ ID NO: 28515 - protein, 11 aa, Homo sapiens
  AACR GENIE Results; TP53_p.R158G; A1101
GTRVGAMAIYK

SEQ ID NO: 28516 - protein, 9 aa, Homo sapiens
  AACR GENIE Results; TP53_p.R158G; C0702
TRVGAMAIY

SEQ ID NO: 28517 - protein, 11 aa, Homo sapiens
  AACR GENIE Results; TP53_p.R158G; B0702
TPPPGTRVGAM

SEQ ID NO: 28518 - protein, 10 aa, Homo sapiens
  AACR GENIE Results; TP53_p.R158G; B0702
TPPPGTRVGA

SEQ ID NO: 28519 - protein, 9 aa, Homo sapiens
  AACR GENIE Results; TP53_p.R158G; B0702
PPGTRVGAM

SEQ ID NO: 28520 - protein, 8 aa, Homo sapiens
  AACR GENIE Results; TP53_p.R158G; A1101
VGAMAIYK

SEQ ID NO: 28521 - protein, 10 aa, Homo sapiens
  AACR GENIE Results; TP53_p.R158G; B0702
PPPGTRVGAM

SEQ ID NO: 28522 - protein, 11 aa, Homo sapiens
  AACR GENIE Results; TP53_p.R158G; B3501
TPPPGTRVGAM

SEQ ID NO: 28523 - protein, 9 aa, Homo sapiens
  AACR GENIE Results; TP53_p.R158H; A0301
RVHAMAIYK

SEQ ID NO: 28524 - protein, 9 aa, Homo sapiens
  AACR GENIE Results; TP53_p.R158H; B2702
TRVHAMAIY

SEQ ID NO: 28525 - protein, 9 aa, Homo sapiens
  AACR GENIE Results; TP53_p.R158H; A1101
RVHAMAIYK

SEQ ID NO: 28526 - protein, 11 aa, Homo sapiens
  AACR GENIE Results; TP53_p.R158H; B3503
TPPPGTRVHAM

SEQ ID NO: 28527 - protein, 11 aa, Homo sapiens
  AACR GENIE Results; TP53_p.R158H; A6802
STPPPGTRVHA

SEQ ID NO: 28528 - protein, 11 aa, Homo sapiens
  AACR GENIE Results; TP53_p.R158H; B3501
TPPPGTRVHAM

SEQ ID NO: 28529 - protein, 11 aa, Homo sapiens
  AACR GENIE Results; TP53_p.R158H; B0801
TPPPGTRVHAM

SEQ ID NO: 28530 - protein, 9 aa, Homo sapiens
  AACR GENIE Results; TP53_p.R158L; B0702
TPPPGTRVL

SEQ ID NO: 28531 - protein, 9 aa, Homo sapiens
  AACR GENIE Results; TP53_p.R158L; B3503
TPPPGTRVL

SEQ ID NO: 28532 - protein, 9 aa, Homo sapiens
  AACR GENIE Results; TP53_p.R158L; A1101
RVLAMAIYK

SEQ ID NO: 28533 - protein, 9 aa, Homo sapiens
  AACR GENIE Results; TP53_p.R158L; A0301
RVLAMAIYK

SEQ ID NO: 28534 - protein, 9 aa, Homo sapiens
  AACR GENIE Results; TP53_p.R158L; C0102
TPPPGTRVL

SEQ ID NO: 28535 - protein, 9 aa, Homo sapiens
  AACR GENIE Results; TP53_p.R158L; B2702
TRVLAMAIY

SEQ ID NO: 28536 - protein, 9 aa, Homo sapiens
  AACR GENIE Results; TP53_p.R158L; B3501
TPPPGTRVL

SEQ ID NO: 28537 - protein, 9 aa, Homo sapiens
  AACR GENIE Results; TP53_p.R158L; B3502
TPPPGTRVL

SEQ ID NO: 28538 - protein, 9 aa, Homo sapiens
  AACR GENIE Results; TP53_p.R158L; B5101
TPPPGTRVL

SEQ ID NO: 28539 - protein, 9 aa, Homo sapiens
  AACR GENIE Results; TP53_p.R158L; B5502
TPPPGTRVL

SEQ ID NO: 28540 - protein, 10 aa, Homo sapiens
  AACR GENIE Results; TP53_p.R158L; C0102
STPPPGTRVL

SEQ ID NO: 28541 - protein, 10 aa, Homo sapiens
  AACR GENIE Results; TP53_p.R158L; B5502
TPPPGTRVLA

SEQ ID NO: 28542 - protein, 11 aa, Homo sapiens
  AACR GENIE Results; TP53_p.R158L; A6802
STPPPGTRVLA

SEQ ID NO: 28543 - protein, 9 aa, Homo sapiens
  AACR GENIE Results; TP53_p.R158L; B3801
TPPPGTRVL

SEQ ID NO: 28544 - protein, 8 aa, Homo sapiens
  AACR GENIE Results; TP53_p.R158L; B0702
PPPGTRVL

SEQ ID NO: 28545 - protein, 11 aa, Homo sapiens
  AACR GENIE Results; TP53_p.R158L; B3501
TPPPGTRVLAM

SEQ ID NO: 28546 - protein, 9 aa, Homo sapiens
  AACR GENIE Results; TP53_p.R158P; A1101
RVPAMAIYK

SEQ ID NO: 28547 - protein, 9 aa, Homo sapiens
  AACR GENIE Results; TP53_p.R158P; A0301
RVPAMAIYK

SEQ ID NO: 28548 - protein, 11 aa, Homo sapiens
  AACR GENIE Results; TP53_p.R158P; A0301
GTRVPAMAIYK

SEQ ID NO: 28549 - protein, 11 aa, Homo sapiens
  AACR GENIE Results; TP53_p.R158P; A1101
GTRVPAMAIYK

SEQ ID NO: 28550 - protein, 10 aa, Homo sapiens
  AACR GENIE Results; TP53_p.R158P; B0702
TPPPGTRVPA

SEQ ID NO: 28551 - protein, 11 aa, Homo sapiens
  AACR GENIE Results; TP53_p.R158P; B3501
TPPPGTRVPAM

SEQ ID NO: 28552 - protein, 9 aa, Homo sapiens
  AACR GENIE Results; TP53_p.R158P; B2705
TRVPAMAIY

SEQ ID NO: 28553 - protein, 9 aa, Homo sapiens
  AACR GENIE Results; TP53_p.R158P; C0702
TRVPAMAIY

SEQ ID NO: 28554 - protein, 9 aa, Homo sapiens
  AACR GENIE Results; TP53_p.R158P; C0602
TRVPAMAIY

SEQ ID NO: 28555 - protein, 9 aa, Homo sapiens
  AACR GENIE Results; TP53_p.R175_R181del; B3801
QHMTEVVRC

SEQ ID NO: 28556 - protein, 8 aa, Homo sapiens
  AACR GENIE Results; TP53_p.R175_R181del; A0201
HMTEVVRC

SEQ ID NO: 28557 - protein, 9 aa, Homo sapiens
  AACR GENIE Results; TP53_p.R175G; A0201
HMTEVVRGC

SEQ ID NO: 28558 - protein, 9 aa, Homo sapiens
  AACR GENIE Results; TP53_p.R175H; B3801
QHMTEVVRH

SEQ ID NO: 28559 - protein, 8 aa, Homo sapiens
  AACR GENIE Results; TP53_p.R175H; C0803
HMTEVVRH

SEQ ID NO: 28560 - protein, 9 aa, Homo sapiens
  AACR GENIE Results; TP53_p.R175H; B1510
QHMTEVVRH

SEQ ID NO: 28561 - protein, 8 aa, Homo sapiens
  AACR GENIE Results; TP53_p.R175L; A0201
HMTEVVRL

SEQ ID NO: 28562 - protein, 8 aa, Homo sapiens
  AACR GENIE Results; TP53_p.R175L; B0801
HMTEVVRL

SEQ ID NO: 28563 - protein, 9 aa, Homo sapiens
  AACR GENIE Results; TP53_p.R181H; B3801
EHCSDSDGL

SEQ ID NO: 28564 - protein, 10 aa, Homo sapiens
  AACR GENIE Results; TP53_p.R181H; B4001
HEHCSDSDGL

SEQ ID NO: 28565 - protein, 10 aa, Homo sapiens
  AACR GENIE Results; TP53_p.R181P; B4001
HEPCSDSDGL

SEQ ID NO: 28566 - protein, 11 aa, Homo sapiens
  AACR GENIE Results; TP53_p.R196P; B3501
IPVEGNLRVEY

SEQ ID NO: 28567 - protein, 9 aa, Homo sapiens
  AACR GENIE Results; TP53_p.R196P; B5101
IPVEGNLRV

SEQ ID NO: 28568 - protein, 11 aa, Homo sapiens
  AACR GENIE Results; TP53_p.R196P; A0201
GLAPPQHLIPV

SEQ ID NO: 28569 - protein, 8 aa, Homo sapiens
  AACR GENIE Results; TP53_p.R196P; A6801
IPVEGNLR

SEQ ID NO: 28570 - protein, 11 aa, Homo sapiens
  AACR GENIE Results; TP53_p.R196P; B1501
IPVEGNLRVEY

SEQ ID NO: 28571 - protein, 9 aa, Homo sapiens
  AACR GENIE Results; TP53_p.R196P; B0702
IPVEGNLRV

SEQ ID NO: 28572 - protein, 9 aa, Homo sapiens
  AACR GENIE Results; TP53_p.R196Q; B1302
IQVEGNLRV

SEQ ID NO: 28573 - protein, 11 aa, Homo sapiens
  AACR GENIE Results; TP53_p.R196Q; A0201
GLAPPQHLIQV

SEQ ID NO: 28574 - protein, 11 aa, Homo sapiens
  AACR GENIE Results; TP53_p.R196Q; B1501
IQVEGNLRVEY

SEQ ID NO: 28575 - protein, 9 aa, Homo sapiens
  AACR GENIE Results; TP53_p.R196Q; A0206
IQVEGNLRV

SEQ ID NO: 28576 - protein, 10 aa, Homo sapiens
  AACR GENIE Results; TP53_p.R196Q; A3002
QVEGNLRVEY

SEQ ID NO: 28577 - protein, 9 aa, Homo sapiens
  AACR GENIE Results; TP53_p.R196Q; A0205
IQVEGNLRV

SEQ ID NO: 28578 - protein, 9 aa, Homo sapiens
  AACR GENIE Results; TP53_p.R196Q; B5101
APPQHLIQV

SEQ ID NO: 28579 - protein, 9 aa, Homo sapiens
  AACR GENIE Results; TP53_p.R196Q; B5502
APPQHLIQV

SEQ ID NO: 28580 - protein, 10 aa, Homo sapiens
  AACR GENIE Results; TP53_p.R196Q; B3501
QVEGNLRVEY

SEQ ID NO: 28581 - protein, 10 aa, Homo sapiens
  AACR GENIE Results; TP53_p.R196Q; B1501
QVEGNLRVEY

SEQ ID NO: 28582 - protein, 11 aa, Homo sapiens
  AACR GENIE Results; TP53_p.R196Q; A6802
GLAPPQHLIQV

SEQ ID NO: 28583 - protein, 10 aa, Homo sapiens
  AACR GENIE Results; TP53_p.R196Q; B5801
QVEGNLRVEY

SEQ ID NO: 28584 - protein, 9 aa, Homo sapiens
  AACR GENIE Results; TP53_p.R196Q; B0702
APPQHLIQV

SEQ ID NO: 28585 - protein, 10 aa, Homo sapiens
  AACR GENIE Results; TP53_p.R196Q; A0101
QVEGNLRVEY

SEQ ID NO: 28586 - protein, 10 aa, Homo sapiens
  AACR GENIE Results; TP53_p.R196Q; C0302
QVEGNLRVEY

SEQ ID NO: 28587 - protein, 11 aa, Homo sapiens
  AACR GENIE Results; TP53_p.R196Q; B1503
IQVEGNLRVEY

SEQ ID NO: 28588 - protein, 9 aa, Homo sapiens
  AACR GENIE Results; TP53_p.R196Q; B5501
APPQHLIQV

SEQ ID NO: 28589 - protein, 11 aa, Homo sapiens
  AACR GENIE Results; TP53_p.R196Q; A3002
IQVEGNLRVEY

SEQ ID NO: 28590 - protein, 10 aa, Homo sapiens
  AACR GENIE Results; TP53_p.R196Q; A2901
QVEGNLRVEY

SEQ ID NO: 28591 - protein, 9 aa, Homo sapiens
  AACR GENIE Results; TP53_p.R196Q; B5001
IQVEGNLRV

SEQ ID NO: 28592 - protein, 11 aa, Homo sapiens
  AACR GENIE Results; TP53_p.R196Q; B3501
IQVEGNLRVEY

SEQ ID NO: 28593 - protein, 10 aa, Homo sapiens
  AACR GENIE Results; TP53_p.R196Q; A6801
HLIQVEGNLR

SEQ ID NO: 28594 - protein, 11 aa, Homo sapiens
  AACR GENIE Results; TP53_p.R196Q; B1502
IQVEGNLRVEY

SEQ ID NO: 28595 - protein, 10 aa, Homo sapiens
  AACR GENIE Results; TP53_p.R196Q; C1602
LAPPQHLIQV

SEQ ID NO: 28596 - protein, 10 aa, Homo sapiens
  AACR GENIE Results; TP53_p.R196Q; B1502
QVEGNLRVEY

SEQ ID NO: 28597 - protein, 10 aa, Homo sapiens
  AACR GENIE Results; TP53_p.R196Q; B3901
QVEGNLRVEY

SEQ ID NO: 28598 - protein, 10 aa, Homo sapiens
  AACR GENIE Results; TP53_p.R196Q; B5701
QVEGNLRVEY

SEQ ID NO: 28599 - protein, 9 aa, Homo sapiens
  AACR GENIE Results; TP53_p.R196Q; A0201
IQVEGNLRV

SEQ ID NO: 28600 - protein, 11 aa, Homo sapiens
  AACR GENIE Results; TP53_p.R196Q; C0801
IQVEGNLRVEY

SEQ ID NO: 28601 - protein, 10 aa, Homo sapiens
  AACR GENIE Results; TP53_p.R196Q; B2702
QVEGNLRVEY

SEQ ID NO: 28602 - protein, 11 aa, Homo sapiens
  AACR GENIE Results; TP53_p.R196Q; B1302
GLAPPQHLIQV

SEQ ID NO: 28603 - protein, 11 aa, Homo sapiens
  AACR GENIE Results; TP53_p.R196Q; B4601
IQVEGNLRVEY

SEQ ID NO: 28604 - protein, 8 aa, Homo sapiens
  AACR GENIE Results; TP53_p.R196Q; B3906
QHLIQVEG

SEQ ID NO: 28605 - protein, 9 aa, Homo sapiens
  AACR GENIE Results; TP53_p.R209Kfs*6; A0201
YLDDKHFST

SEQ ID NO: 28606 - protein, 9 aa, Homo sapiens
  AACR GENIE Results; TP53_p.R209Kfs*6; B4403
VEYLDDKHF

SEQ ID NO: 28607 - protein, 9 aa, Homo sapiens
  AACR GENIE Results; TP53_p.R209Kfs*6; B0801
YLDDKHFST

SEQ ID NO: 28608 - protein, 9 aa, Homo sapiens
  AACR GENIE Results; TP53_p.R209Kfs*6; C0802
YLDDKHFST

SEQ ID NO: 28609 - protein, 9 aa, Homo sapiens
  AACR GENIE Results; TP53_p.R209Kfs*6; A6802
YLDDKHFST

SEQ ID NO: 28610 - protein, 10 aa, Homo sapiens
  AACR GENIE Results; TP53_p.R209Kfs*6; A3303
EYLDDKHFST

SEQ ID NO: 28611 - protein, 8 aa, Homo sapiens
  AACR GENIE Results; TP53_p.R209Kfs*6; B0801
LDDKHFST

SEQ ID NO: 28612 - protein, 9 aa, Homo sapiens
  AACR GENIE Results; TP53_p.R209Kfs*6; B4402
VEYLDDKHF

SEQ ID NO: 28613 - protein, 8 aa, Homo sapiens
  AACR GENIE Results; TP53_p.R209Kfs*6; A3303
EYLDDKHF

SEQ ID NO: 28614 - protein, 8 aa, Homo sapiens
  AACR GENIE Results; TP53_p.R209Kfs*6; A2301
EYLDDKHF

SEQ ID NO: 28615 - protein, 9 aa, Homo sapiens
  AACR GENIE Results; TP53_p.R209Kfs*6; A2301
VEYLDDKHF

SEQ ID NO: 28616 - protein, 9 aa, Homo sapiens
  AACR GENIE Results; TP53_p.R209Kfs*6; B2702
LRVEYLDDK

SEQ ID NO: 28617 - protein, 9 aa, Homo sapiens
  AACR GENIE Results; TP53_p.R209Kfs*6; A0301
YLDDKHFST

SEQ ID NO: 28618 - protein, 9 aa, Homo sapiens
  AACR GENIE Results; TP53_p.R213L; A0201
YLDDRNTFL

SEQ ID NO: 28619 - protein, 9 aa, Homo sapiens
  AACR GENIE Results; TP53_p.R213L; C0802
YLDDRNTFL

SEQ ID NO: 28620 - protein, 9 aa, Homo sapiens
  AACR GENIE Results; TP53_p.R213L; C0501
YLDDRNTFL

SEQ ID NO: 28621 - protein, 9 aa, Homo sapiens
  AACR GENIE Results; TP53_p.R213L; C1701
YLDDRNTFL

SEQ ID NO: 28622 - protein, 9 aa, Homo sapiens
  AACR GENIE Results; TP53_p.R213L; A6802
NTFLHSVVV

SEQ ID NO: 28623 - protein, 9 aa, Homo sapiens
  AACR GENIE Results; TP53_p.R213L; C0401
YLDDRNTFL

SEQ ID NO: 28624 - protein, 8 aa, Homo sapiens
  AACR GENIE Results; TP53_p.R213L; B1402
NTFLHSVV

SEQ ID NO: 28625 - protein, 10 aa, Homo sapiens
  AACR GENIE Results; TP53_p.R213L; A2301
EYLDDRNTFL

SEQ ID NO: 28626 - protein, 9 aa, Homo sapiens
  AACR GENIE Results; TP53_p.R213L; C1203
NTFLHSVVV

SEQ ID NO: 28627 - protein, 10 aa, Homo sapiens
  AACR GENIE Results; TP53_p.R213L; A2902
TFLHSVVVPY

SEQ ID NO: 28628 - protein, 8 aa, Homo sapiens
  AACR GENIE Results; TP53_p.R213L; C0802
LDDRNTFL

SEQ ID NO: 28629 - protein, 9 aa, Homo sapiens
  AACR GENIE Results; TP53_p.R213L; C0304
YLDDRNTFL

SEQ ID NO: 28630 - protein, 10 aa, Homo sapiens
  AACR GENIE Results; TP53_p.R213L; A2402
EYLDDRNTFL

SEQ ID NO: 28631 - protein, 9 aa, Homo sapiens
  AACR GENIE Results; TP53_p.R213L; C1502
RNTFLHSVV

SEQ ID NO: 28632 - protein, 9 aa, Homo sapiens
  AACR GENIE Results; TP53_p.R213L; B1402
DRNTFLHSV

SEQ ID NO: 28633 - protein, 8 aa, Homo sapiens
  AACR GENIE Results; TP53_p.R213L; C1203
NTFLHSVV

SEQ ID NO: 28634 - protein, 9 aa, Homo sapiens
  AACR GENIE Results; TP53_p.R213L; C1502
NTFLHSVVV

SEQ ID NO: 28635 - protein, 10 aa, Homo sapiens
  AACR GENIE Results; TP53_p.R213L; B2702
TFLHSVVVPY

SEQ ID NO: 28636 - protein, 9 aa, Homo sapiens
  AACR GENIE Results; TP53_p.R213L; A2902
FLHSVVVPY

SEQ ID NO: 28637 - protein, 9 aa, Homo sapiens
  AACR GENIE Results; TP53_p.R213L; C1502
YLDDRNTFL

SEQ ID NO: 28638 - protein, 11 aa, Homo sapiens
  AACR GENIE Results; TP53_p.R213L; B4901
VEYLDDRNTFL

SEQ ID NO: 28639 - protein, 10 aa, Homo sapiens
  AACR GENIE Results; TP53_p.R213L; A3303
EYLDDRNTFL

SEQ ID NO: 28640 - protein, 9 aa, Homo sapiens
  AACR GENIE Results; TP53_p.R213L; B3801
YLDDRNTFL

SEQ ID NO: 28641 - protein, 9 aa, Homo sapiens
  AACR GENIE Results; TP53_p.R213L; C0602
DRNTFLHSV

SEQ ID NO: 28642 - protein, 9 aa, Homo sapiens
  AACR GENIE Results; TP53_p.R213Q; C1203
NTFQHSVVV

SEQ ID NO: 28643 - protein, 9 aa, Homo sapiens
  AACR GENIE Results; TP53_p.R213Q; B1501
FQHSVVVPY

SEQ ID NO: 28644 - protein, 9 aa, Homo sapiens
  AACR GENIE Results; TP53_p.R213Q; C0202
FQHSVVVPY

SEQ ID NO: 28645 - protein, 8 aa, Homo sapiens
  AACR GENIE Results; TP53_p.R213Q; C1203
NTFQHSVV

SEQ ID NO: 28646 - protein, 9 aa, Homo sapiens
  AACR GENIE Results; TP53_p.R213Q; C0602
DRNTFQHSV

SEQ ID NO: 28647 - protein, 8 aa, Homo sapiens
  AACR GENIE Results; TP53_p.R248G; B5101
NGRPILTI

SEQ ID NO: 28648 - protein, 9 aa, Homo sapiens
  AACR GENIE Results; TP53_p.R248G; B0702
GGMNGRPIL

SEQ ID NO: 28649 - protein, 10 aa, Homo sapiens
  AACR GENIE Results; TP53_p.R248G; A1101
SCMGGMNGRP

SEQ ID NO: 28650 - protein, 9 aa, Homo sapiens
  AACR GENIE Results; TP53_p.R248L; A3303
SCMGGMNLR

SEQ ID NO: 28651 - protein, 9 aa, Homo sapiens
  AACR GENIE Results; TP53_p.R248L; A6801
SCMGGMNLR

SEQ ID NO: 28652 - protein, 9 aa, Homo sapiens
  AACR GENIE Results; TP53_p.R248L; A3101
SCMGGMNLR

SEQ ID NO: 28653 - protein, 10 aa, Homo sapiens
  AACR GENIE Results; TP53_p.R248L; A1101
SCMGGMNLRP

SEQ ID NO: 28654 - protein, 8 aa, Homo sapiens
  AACR GENIE Results; TP53_p.R248P; B5101
NPRPILTI

SEQ ID NO: 28655 - protein, 9 aa, Homo sapiens
  AACR GENIE Results; TP53_p.R248P; B5101
NPRPILTII

SEQ ID NO: 28656 - protein, 10 aa, Homo sapiens
  AACR GENIE Results; TP53_p.R248P; B1302
GMNPRPILTI

SEQ ID NO: 28657 - protein, 9 aa, Homo sapiens
  AACR GENIE Results; TP53_p.R248P; B0702
NPRPILTII

SEQ ID NO: 28658 - protein, 11 aa, Homo sapiens
  AACR GENIE Results; TP53_p.R248P; B0702
NPRPILTIITL

SEQ ID NO: 28659 - protein, 8 aa, Homo sapiens
  AACR GENIE Results; TP53_p.R248P; B0702
NPRPILTI

SEQ ID NO: 28660 - protein, 9 aa, Homo sapiens
  AACR GENIE Results; TP53_p.R248P; A6801
SCMGGMNPR

SEQ ID NO: 28661 - protein, 9 aa, Homo sapiens
  AACR GENIE Results; TP53_p.R248P; A1101
SCMGGMNPR

SEQ ID NO: 28662 - protein, 9 aa, Homo sapiens
  AACR GENIE Results; TP53_p.R248P; B0702
GGMNPRPIL

SEQ ID NO: 28663 - protein, 8 aa, Homo sapiens
  AACR GENIE Results; TP53_p.R248Q; B1302
NQRPILTI

SEQ ID NO: 28664 - protein, 9 aa, Homo sapiens
  AACR GENIE Results; TP53_p.R248Q; A3303
SCMGGMNQR

SEQ ID NO: 28665 - protein, 8 aa, Homo sapiens
  AACR GENIE Results; TP53_p.R248Q; B3906
NQRPILTI

SEQ ID NO: 28666 - protein, 9 aa, Homo sapiens
  AACR GENIE Results; TP53_p.R248Q; A6801
SCMGGMNQR

SEQ ID NO: 28667 - protein, 9 aa, Homo sapiens
  AACR GENIE Results; TP53_p.R248Q; B4102
GGMNQRPIL

SEQ ID NO: 28668 - protein, 9 aa, Homo sapiens
  AACR GENIE Results; TP53_p.R248Q; B1302
NQRPILTII

SEQ ID NO: 28669 - protein, 9 aa, Homo sapiens
  AACR GENIE Results; TP53_p.R248Q; A0203
NQRPILTII

SEQ ID NO: 28670 - protein, 9 aa, Homo sapiens
  AACR GENIE Results; TP53_p.R248Q; B1510
GGMNQRPIL

SEQ ID NO: 28671 - protein, 9 aa, Homo sapiens
  AACR GENIE Results; TP53_p.R248Q; A3101
SCMGGMNQR

SEQ ID NO: 28672 - protein, 9 aa, Homo sapiens
  AACR GENIE Results; TP53_p.R248Q; A1101
SCMGGMNQR

SEQ ID NO: 28673 - protein, 10 aa, Homo sapiens
  AACR GENIE Results; TP53_p.R248Q; B1302
GMNQRPILTI

SEQ ID NO: 28674 - protein, 9 aa, Homo sapiens
  AACR GENIE Results; TP53_p.R248Q; B3906
NQRPILTII

SEQ ID NO: 28675 - protein, 10 aa, Homo sapiens
  AACR GENIE Results; TP53_p.R248Q; A1101
SCMGGMNQRP

SEQ ID NO: 28676 - protein, 8 aa, Homo sapiens
  AACR GENIE Results; TP53_p.R248Q; B5101
NQRPILTI

SEQ ID NO: 28677 - protein, 9 aa, Homo sapiens
  AACR GENIE Results; TP53_p.R248Q; B4002
GGMNQRPIL

SEQ ID NO: 28678 - protein, 9 aa, Homo sapiens
  AACR GENIE Results; TP53_p.R248Q; B0702
GGMNQRPIL

SEQ ID NO: 28679 - protein, 9 aa, Homo sapiens
  AACR GENIE Results; TP53_p.R248Q; A3301
SCMGGMNQR

SEQ ID NO: 28680 - protein, 10 aa, Homo sapiens
  AACR GENIE Results; TP53_p.R248Q; A6801
SSCMGGMNQR

SEQ ID NO: 28681 - protein, 9 aa, Homo sapiens
  AACR GENIE Results; TP53_p.R248Q; A3001
NQRPILTII

SEQ ID NO: 28682 - protein, 10 aa, Homo sapiens
  AACR GENIE Results; TP53_p.R248Q; A0203
GMNQRPILTI

SEQ ID NO: 28683 - protein, 8 aa, Homo sapiens
  AACR GENIE Results; TP53_p.R248Q; B1402
NQRPILTI

SEQ ID NO: 28684 - protein, 9 aa, Homo sapiens
  AACR GENIE Results; TP53_p.R249G; C0602
NRGPILTII

SEQ ID NO: 28685 - protein, 9 aa, Homo sapiens
  AACR GENIE Results; TP53_p.R249G; B0702
GPILTIITL

SEQ ID NO: 28686 - protein, 8 aa, Homo sapiens
  AACR GENIE Results; TP53_p.R249G; C0602
NRGPILTI

SEQ ID NO: 28687 - protein, 9 aa, Homo sapiens
  AACR GENIE Results; TP53_p.R249G; B3501
GPILTIITL

SEQ ID NO: 28688 - protein, 9 aa, Homo sapiens
  AACR GENIE Results; TP53_p.R249G; B5101
GPILTIITL

SEQ ID NO: 28689 - protein, 9 aa, Homo sapiens
  AACR GENIE Results; TP53_p.R249K; B0702
KPILTIITL

SEQ ID NO: 28690 - protein, 9 aa, Homo sapiens
  AACR GENIE Results; TP53_p.R249K; C0602
NRKPILTII

SEQ ID NO: 28691 - protein, 9 aa, Homo sapiens
  AACR GENIE Results; TP53_p.R249K; B3503
KPILTIITL

SEQ ID NO: 28692 - protein, 9 aa, Homo sapiens
  AACR GENIE Results; TP53_p.R249K; B5501
KPILTIITL

SEQ ID NO: 28693 - protein, 9 aa, Homo sapiens
  AACR GENIE Results; TP53_p.R249K; B3501
KPILTIITL

SEQ ID NO: 28694 - protein, 9 aa, Homo sapiens
  AACR GENIE Results; TP53_p.R249K; A1101
SCMGGMNRK

SEQ ID NO: 28695 - protein, 8 aa, Homo sapiens
  AACR GENIE Results; TP53_p.R249K; B1402
NRKPILTI

SEQ ID NO: 28696 - protein, 9 aa, Homo sapiens
  AACR GENIE Results; TP53_p.R249K; B5101
KPILTIITL

SEQ ID NO: 28697 - protein, 9 aa, Homo sapiens
  AACR GENIE Results; TP53_p.R249M; B3503
MPILTIITL

SEQ ID NO: 28698 - protein, 9 aa, Homo sapiens
  AACR GENIE Results; TP53_p.R249M; B3501
MPILTIITL

SEQ ID NO: 28699 - protein, 9 aa, Homo sapiens
  AACR GENIE Results; TP53_p.R249M; B3502
MPILTIITL

SEQ ID NO: 28700 - protein, 9 aa, Homo sapiens
  AACR GENIE Results; TP53_p.R249M; B5101
MPILTIITL

SEQ ID NO: 28701 - protein, 9 aa, Homo sapiens
  AACR GENIE Results; TP53_p.R249M; C0602
NRMPILTII

SEQ ID NO: 28702 - protein, 9 aa, Homo sapiens
  AACR GENIE Results; TP53_p.R249M; B0702
MPILTIITL

SEQ ID NO: 28703 - protein, 9 aa, Homo sapiens
  AACR GENIE Results; TP53_p.R249M; B5501
MPILTIITL

SEQ ID NO: 28704 - protein, 9 aa, Homo sapiens
  AACR GENIE Results; TP53_p.R249M; B0801
MPILTIITL

SEQ ID NO: 28705 - protein, 10 aa, Homo sapiens
  AACR GENIE Results; TP53_p.R249M; B1302
GMNRMPILTI

SEQ ID NO: 28706 - protein, 8 aa, Homo sapiens
  AACR GENIE Results; TP53_p.R249M; C0602
NRMPILTI

SEQ ID NO: 28707 - protein, 9 aa, Homo sapiens
  AACR GENIE Results; TP53_p.R249M; B2705
NRMPILTII

SEQ ID NO: 28708 - protein, 9 aa, Homo sapiens
  AACR GENIE Results; TP53_p.R249S; B3503
SPILTIITL

SEQ ID NO: 28709 - protein, 9 aa, Homo sapiens
  AACR GENIE Results; TP53_p.R249S; C0602
NRSPILTII

SEQ ID NO: 28710 - protein, 9 aa, Homo sapiens
  AACR GENIE Results; TP53_p.R249S; B0702
SPILTIITL

SEQ ID NO: 28711 - protein, 9 aa, Homo sapiens
  AACR GENIE Results; TP53_p.R249S; B3501
SPILTIITL

SEQ ID NO: 28712 - protein, 10 aa, Homo sapiens
  AACR GENIE Results; TP53_p.R249S; B1302
GMNRSPILTI

SEQ ID NO: 28713 - protein, 9 aa, Homo sapiens
  AACR GENIE Results; TP53_p.R249S; B5501
SPILTIITL

SEQ ID NO: 28714 - protein, 9 aa, Homo sapiens
  AACR GENIE Results; TP53_p.R249S; B5101
SPILTIITL

SEQ ID NO: 28715 - protein, 8 aa, Homo sapiens
  AACR GENIE Results; TP53_p.R249S; C0602
NRSPILTI

SEQ ID NO: 28716 - protein, 9 aa, Homo sapiens
  AACR GENIE Results; TP53_p.R249S; B3801
NRSPILTII

SEQ ID NO: 28717 - protein, 9 aa, Homo sapiens
  AACR GENIE Results; TP53_p.R249S; B2705
NRSPILTII

SEQ ID NO: 28718 - protein, 9 aa, Homo sapiens
  AACR GENIE Results; TP53_p.R249S; B0801
SPILTIITL

SEQ ID NO: 28719 - protein, 9 aa, Homo sapiens
  AACR GENIE Results; TP53_p.R249S; A0201
GGMNRSPIL

SEQ ID NO: 28720 - protein, 9 aa, Homo sapiens
  AACR GENIE Results; TP53_p.R249T; B3501
TPILTIITL

SEQ ID NO: 28721 - protein, 9 aa, Homo sapiens
  AACR GENIE Results; TP53_p.R249T; B0702
TPILTIITL

SEQ ID NO: 28722 - protein, 9 aa, Homo sapiens
  AACR GENIE Results; TP53_p.R249T; C0602
NRTPILTII

SEQ ID NO: 28723 - protein, 9 aa, Homo sapiens
  AACR GENIE Results; TP53_p.R249T; B5101
TPILTIITL

SEQ ID NO: 28724 - protein, 9 aa, Homo sapiens
  AACR GENIE Results; TP53_p.R249T; B0801
TPILTIITL

SEQ ID NO: 28725 - protein, 9 aa, Homo sapiens
  AACR GENIE Results; TP53_p.R249T; A0201
GGMNRTPIL

SEQ ID NO: 28726 - protein, 9 aa, Homo sapiens
  AACR GENIE Results; TP53_p.R249W; C0602
NRWPILTII

SEQ ID NO: 28727 - protein, 9 aa, Homo sapiens
  AACR GENIE Results; TP53_p.R249W; B3501
WPILTIITL

SEQ ID NO: 28728 - protein, 9 aa, Homo sapiens
  AACR GENIE Results; TP53_p.R249W; B5101
WPILTIITL

SEQ ID NO: 28729 - protein, 9 aa, Homo sapiens
  AACR GENIE Results; TP53_p.R267L; A0201
GLNSFEVRV

SEQ ID NO: 28730 - protein, 10 aa, Homo sapiens
  AACR GENIE Results; TP53_p.R267L; A0201
NLLGLNSFEV

SEQ ID NO: 28731 - protein, 10 aa, Homo sapiens
  AACR GENIE Results; TP53_p.R267L; A0201
GLNSFEVRVC

SEQ ID NO: 28732 - protein, 9 aa, Homo sapiens
  AACR GENIE Results; TP53_p.R267P; A0201
LLGPNSFEV

SEQ ID NO: 28733 - protein, 10 aa, Homo sapiens
  AACR GENIE Results; TP53_p.R267P; A0201
NLLGPNSFEV

SEQ ID NO: 28734 - protein, 9 aa, Homo sapiens
  AACR GENIE Results; TP53_p.R267P; B1302
GPNSFEVRV

SEQ ID NO: 28735 - protein, 11 aa, Homo sapiens
  AACR GENIE Results; TP53_p.R267P; A0201
LLGPNSFEVRV

SEQ ID NO: 28736 - protein, 9 aa, Homo sapiens
  AACR GENIE Results; TP53_p.R267P; B1302
LLGPNSFEV

SEQ ID NO: 28737 - protein, 9 aa, Homo sapiens
  AACR GENIE Results; TP53_p.R267P; B5101
GPNSFEVRV

SEQ ID NO: 28738 - protein, 9 aa, Homo sapiens
  AACR GENIE Results; TP53_p.R267P; B0702
GPNSFEVRV

SEQ ID NO: 28739 - protein, 11 aa, Homo sapiens
  AACR GENIE Results; TP53_p.R267W; B4403
LEDSSGNLLGW

SEQ ID NO: 28740 - protein, 11 aa, Homo sapiens
  AACR GENIE Results; TP53_p.R267W; B4402
LEDSSGNLLGW

SEQ ID NO: 28741 - protein, 10 aa, Homo sapiens
  AACR GENIE Results; TP53_p.R267W; B4403
EDSSGNLLGW

SEQ ID NO: 28742 - protein, 9 aa, Homo sapiens
  AACR GENIE Results; TP53_p.R267W; B5701
DSSGNLLGW

SEQ ID NO: 28743 - protein, 9 aa, Homo sapiens
  AACR GENIE Results; TP53_p.R267W; A6801
DSSGNLLGW

SEQ ID NO: 28744 - protein, 10 aa, Homo sapiens
  AACR GENIE Results; TP53_p.R267W; B4402
EDSSGNLLGW

SEQ ID NO: 28745 - protein, 8 aa, Homo sapiens
  AACR GENIE Results; TP53_p.R267W; B5701
SSGNLLGW

SEQ ID NO: 28746 - protein, 10 aa, Homo sapiens
  AACR GENIE Results; TP53_p.R267W; A0201
NLLGWNSFEV

SEQ ID NO: 28747 - protein, 9 aa, Homo sapiens
  AACR GENIE Results; TP53_p.R267W; A0201
LLGWNSFEV

SEQ ID NO: 28748 - protein, 9 aa, Homo sapiens
  AACR GENIE Results; TP53_p.R273C; B2705
GRNSFEVCV

SEQ ID NO: 28749 - protein, 9 aa, Homo sapiens
  AACR GENIE Results; TP53_p.R273C; B3906
GRNSFEVCV

SEQ ID NO: 28750 - protein, 9 aa, Homo sapiens
  AACR GENIE Results; TP53_p.R273C; B3906
NSFEVCVCA

SEQ ID NO: 28751 - protein, 8 aa, Homo sapiens
  AACR GENIE Results; TP53_p.R273C; B3906
NSFEVCVC

SEQ ID NO: 28752 - protein, 9 aa, Homo sapiens
  AACR GENIE Results; TP53_p.R273C; A6802
NSFEVCVCA

SEQ ID NO: 28753 - protein, 9 aa, Homo sapiens
  AACR GENIE Results; TP53_p.R273H; B2705
GRNSFEVHV

SEQ ID NO: 28754 - protein, 9 aa, Homo sapiens
  AACR GENIE Results; TP53_p.R273H; B3906
NSFEVHVCA

SEQ ID NO: 28755 - protein, 8 aa, Homo sapiens
  AACR GENIE Results; TP53_p.R273H; B3906
NSFEVHVC

SEQ ID NO: 28756 - protein, 9 aa, Homo sapiens
  AACR GENIE Results; TP53_p.R273H; A6802
NSFEVHVCA

SEQ ID NO: 28757 - protein, 9 aa, Homo sapiens
  AACR GENIE Results; TP53_p.R273H; A0205
NSFEVHVCA

SEQ ID NO: 28758 - protein, 9 aa, Homo sapiens
  AACR GENIE Results; TP53_p.R273H; B3906
GRNSFEVHV

SEQ ID NO: 28759 - protein, 8 aa, Homo sapiens
  AACR GENIE Results; TP53_p.R273H; C1203
NSFEVHVC

SEQ ID NO: 28760 - protein, 9 aa, Homo sapiens
  AACR GENIE Results; TP53_p.R273H; C0602
GRNSFEVHV

SEQ ID NO: 28761 - protein, 8 aa, Homo sapiens
  AACR GENIE Results; TP53_p.R273H; B4002
NSFEVHVC

SEQ ID NO: 28762 - protein, 9 aa, Homo sapiens
  AACR GENIE Results; TP53_p.R273H; B5001
FEVHVCACP

SEQ ID NO: 28763 - protein, 9 aa, Homo sapiens
  AACR GENIE Results; TP53_p.R273H; A6801
NSFEVHVCA

SEQ ID NO: 28764 - protein, 9 aa, Homo sapiens
  AACR GENIE Results; TP53_p.R273L; B3906
NSFEVLVCA

SEQ ID NO: 28765 - protein, 9 aa, Homo sapiens
  AACR GENIE Results; TP53_p.R273L; A0205
NSFEVLVCA

SEQ ID NO: 28766 - protein, 9 aa, Homo sapiens
  AACR GENIE Results; TP53_p.R273L; A6802
NSFEVLVCA

SEQ ID NO: 28767 - protein, 9 aa, Homo sapiens
  AACR GENIE Results; TP53_p.R273L; A0206
NSFEVLVCA

SEQ ID NO: 28768 - protein, 9 aa, Homo sapiens
  AACR GENIE Results; TP53_p.R273L; B2705
GRNSFEVLV

SEQ ID NO: 28769 - protein, 9 aa, Homo sapiens
  AACR GENIE Results; TP53_p.R273L; B5001
FEVLVCACP

SEQ ID NO: 28770 - protein, 8 aa, Homo sapiens
  AACR GENIE Results; TP53_p.R273L; B3906
NSFEVLVC

SEQ ID NO: 28771 - protein, 9 aa, Homo sapiens
  AACR GENIE Results; TP53_p.R273L; B5001
NSFEVLVCA

SEQ ID NO: 28772 - protein, 9 aa, Homo sapiens
  AACR GENIE Results; TP53_p.R273L; C0602
GRNSFEVLV

SEQ ID NO: 28773 - protein, 8 aa, Homo sapiens
  AACR GENIE Results; TP53_p.R273L; B4002
FEVLVCAC

SEQ ID NO: 28774 - protein, 8 aa, Homo sapiens
  AACR GENIE Results; TP53_p.R273L; B1801
FEVLVCAC

SEQ ID NO: 28775 - protein, 9 aa, Homo sapiens
  AACR GENIE Results; TP53_p.R273P; B2705
GRNSFEVPV

SEQ ID NO: 28776 - protein, 8 aa, Homo sapiens
  AACR GENIE Results; TP53_p.R273P; B5101
NSFEVPVC

SEQ ID NO: 28777 - protein, 9 aa, Homo sapiens
  AACR GENIE Results; TP53_p.R273P; A6801
NSFEVPVCA

SEQ ID NO: 28778 - protein, 8 aa, Homo sapiens
  AACR GENIE Results; TP53_p.R273P; C1203
NSFEVPVC

SEQ ID NO: 28779 - protein, 8 aa, Homo sapiens
  AACR GENIE Results; TP53_p.R273P; B1801
FEVPVCAC

SEQ ID NO: 28780 - protein, 9 aa, Homo sapiens
  AACR GENIE Results; TP53_p.R273S; B2705
GRNSFEVSV

SEQ ID NO: 28781 - protein, 9 aa, Homo sapiens
  AACR GENIE Results; TP53_p.R273S; C0602
GRNSFEVSV

SEQ ID NO: 28782 - protein, 8 aa, Homo sapiens
  AACR GENIE Results; TP53_p.R273S; C1203
NSFEVSVC

SEQ ID NO: 28783 - protein, 9 aa, Homo sapiens
  AACR GENIE Results; TP53_p.R273S; A6801
NSFEVSVCA

SEQ ID NO: 28784 - protein, 9 aa, Homo sapiens
  AACR GENIE Results; TP53_p.R273S; B1302
GRNSFEVSV

SEQ ID NO: 28785 - protein, 9 aa, Homo sapiens
  AACR GENIE Results; TP53_p.R280Efs*65; A6801
TPAPLPSQR

SEQ ID NO: 28786 - protein, 10 aa, Homo sapiens
  AACR GENIE Results; TP53_p.R280Efs*65; A6801
TTPAPLPSQR

SEQ ID NO: 28787 - protein, 10 aa, Homo sapiens
  AACR GENIE Results; TP53_p.R280Efs*65; B0702
SPFRSVGVSA

SEQ ID NO: 28788 - protein, 9 aa, Homo sapiens
  AACR GENIE Results; TP53_p.R280Efs*65; C0102
ISPFRSVGV

SEQ ID NO: 28789 - protein, 9 aa, Homo sapiens
  AACR GENIE Results; TP53_p.R280Efs*65; A3101
RSVGVSASR

SEQ ID NO: 28790 - protein, 8 aa, Homo sapiens
  AACR GENIE Results; TP53_p.R280Efs*65; B5101
SPFRSVGV

SEQ ID NO: 28791 - protein, 8 aa, Homo sapiens
  AACR GENIE Results; TP53_p.R280Efs*65; B0702
SPFRSVGV

SEQ ID NO: 28792 - protein, 9 aa, Homo sapiens
  AACR GENIE Results; TP53_p.R280Efs*65; A6801
RSVGVSASR

SEQ ID NO: 28793 - protein, 9 aa, Homo sapiens
  AACR GENIE Results; TP53_p.R280Efs*65; B5701
RSVGVSASR

SEQ ID NO: 28794 - protein, 8 aa, Homo sapiens
  AACR GENIE Results; TP53_p.R280Efs*65; B0801
SPFRSVGV

SEQ ID NO: 28795 - protein, 8 aa, Homo sapiens
  AACR GENIE Results; TP53_p.R280Efs*65; B1302
SPFRSVGV

SEQ ID NO: 28796 - protein, 9 aa, Homo sapiens
  AACR GENIE Results; TP53_p.R280Efs*65; A1101
RSVGVSASR

SEQ ID NO: 28797 - protein, 10 aa, Homo sapiens
  AACR GENIE Results; TP53_p.R280Efs*65; A3001
MENISPFRSV

SEQ ID NO: 28798 - protein, 9 aa, Homo sapiens
  AACR GENIE Results; TP53_p.R280Efs*65; A0301
RSVGVSASR

SEQ ID NO: 28799 - protein, 9 aa, Homo sapiens
  AACR GENIE Results; TP53_p.R280Efs*65; B0702
RISARKGSL

SEQ ID NO: 28800 - protein, 10 aa, Homo sapiens
  AACR GENIE Results; TP53_p.R280Efs*65; A6801
TPAPLPSQRR

SEQ ID NO: 28801 - protein, 8 aa, Homo sapiens
  AACR GENIE Results; TP53_p.R280Efs*65; A3101
SVGVSASR

SEQ ID NO: 28802 - protein, 9 aa, Homo sapiens
  AACR GENIE Results; TP53_p.R283P; A0101
PTEEENLRK

SEQ ID NO: 28803 - protein, 11 aa, Homo sapiens
  AACR GENIE Results; TP53_p.R283P; A3101
RDRPTEEENLR

SEQ ID NO: 28804 - protein, 10 aa, Homo sapiens
  AACR GENIE Results; TP53_p.R283P; A3001
RDRPTEEENL

SEQ ID NO: 28805 - protein, 10 aa, Homo sapiens
  AACR GENIE Results; TP53_p.R290H; A1101
RTEEENLHKK

SEQ ID NO: 28806 - protein, 9 aa, Homo sapiens
  AACR GENIE Results; TP53_p.R290H; A1101
RTEEENLHK

SEQ ID NO: 28807 - protein, 10 aa, Homo sapiens
  AACR GENIE Results; TP53_p.R290H; A0301
RTEEENLHKK

SEQ ID NO: 28808 - protein, 9 aa, Homo sapiens
  AACR GENIE Results; TP53_p.R337L; A6802
ELFEMFREL

SEQ ID NO: 28809 - protein, 9 aa, Homo sapiens
  AACR GENIE Results; TP53_p.R337L; B5701
RGRELFEMF

SEQ ID NO: 28810 - protein, 9 aa, Homo sapiens
  AACR GENIE Results; TP53_p.S106R; B5701
KTYQGRYGF

SEQ ID NO: 28811 - protein, 9 aa, Homo sapiens
  AACR GENIE Results; TP53_p.S106R; A3201
KTYQGRYGF

SEQ ID NO: 28812 - protein, 9 aa, Homo sapiens
  AACR GENIE Results; TP53_p.S106R; B1501
SQKTYQGRY

SEQ ID NO: 28813 - protein, 9 aa, Homo sapiens
  AACR GENIE Results; TP53_p.S106R; C0602
GRYGFRLGF

SEQ ID NO: 28814 - protein, 9 aa, Homo sapiens
  AACR GENIE Results; TP53_p.S106R; B2705
GRYGFRLGF

SEQ ID NO: 28815 - protein, 8 aa, Homo sapiens
  AACR GENIE Results; TP53_p.S106R; A2301
TYQGRYGF

SEQ ID NO: 28816 - protein, 9 aa, Homo sapiens
  AACR GENIE Results; TP53_p.S106R; A3101
KTYQGRYGF

SEQ ID NO: 28817 - protein, 9 aa, Homo sapiens
  AACR GENIE Results; TP53_p.S106R; C1601
KTYQGRYGF

SEQ ID NO: 28818 - protein, 10 aa, Homo sapiens
  AACR GENIE Results; TP53_p.S106R; A3101
KTYQGRYGFR

SEQ ID NO: 28819 - protein, 9 aa, Homo sapiens
  AACR GENIE Results; TP53_p.S127F; A1101
CTYFPALNK

SEQ ID NO: 28820 - protein, 9 aa, Homo sapiens
  AACR GENIE Results; TP53_p.S127F; A0301
CTYFPALNK

SEQ ID NO: 28821 - protein, 9 aa, Homo sapiens
  AACR GENIE Results; TP53_p.S127F; C1402
YFPALNKMF

SEQ ID NO: 28822 - protein, 10 aa, Homo sapiens
  AACR GENIE Results; TP53_p.S127F; A2301
TYFPALNKMF

SEQ ID NO: 28823 - protein, 10 aa, Homo sapiens
  AACR GENIE Results; TP53_p.S127F; A2402
TYFPALNKMF

SEQ ID NO: 28824 - protein, 9 aa, Homo sapiens
  AACR GENIE Results; TP53_p.S127F; C1402
TYFPALNKM

SEQ ID NO: 28825 - protein, 9 aa, Homo sapiens
  AACR GENIE Results; TP53_p.S127F; A2402
TYFPALNKM

SEQ ID NO: 28826 - protein, 9 aa, Homo sapiens
  AACR GENIE Results; TP53_p.S127F; A2301
TYFPALNKM

SEQ ID NO: 28827 - protein, 9 aa, Homo sapiens
  AACR GENIE Results; TP53_p.S127F; C0303
VTCTYFPAL

SEQ ID NO: 28828 - protein, 8 aa, Homo sapiens
  AACR GENIE Results; TP53_p.S127F; C1402
YFPALNKM

SEQ ID NO: 28829 - protein, 10 aa, Homo sapiens
  AACR GENIE Results; TP53_p.S127F; C1402
TYFPALNKMF

SEQ ID NO: 28830 - protein, 10 aa, Homo sapiens
  AACR GENIE Results; TP53_p.S127F; B5701
TAKSVTCTYF

SEQ ID NO: 28831 - protein, 9 aa, Homo sapiens
  AACR GENIE Results; TP53_p.S127F; A2301
YFPALNKMF

SEQ ID NO: 28832 - protein, 9 aa, Homo sapiens
  AACR GENIE Results; TP53_p.S127F; C0602
TYFPALNKM

SEQ ID NO: 28833 - protein, 8 aa, Homo sapiens
  AACR GENIE Results; TP53_p.S127F; B3501
FPALNKMF

SEQ ID NO: 28834 - protein, 8 aa, Homo sapiens
  AACR GENIE Results; TP53_p.S127F; A3303
TYFPALNK

SEQ ID NO: 28835 - protein, 9 aa, Homo sapiens
  AACR GENIE Results; TP53_p.S127F; A3303
TYFPALNKM

SEQ ID NO: 28836 - protein, 10 aa, Homo sapiens
  AACR GENIE Results; TP53_p.S127F; A3101
TAKSVTCTYF

SEQ ID NO: 28837 - protein, 9 aa, Homo sapiens
  AACR GENIE Results; TP53_p.S127Y; A0301
CTYYPALNK

SEQ ID NO: 28838 - protein, 9 aa, Homo sapiens
  AACR GENIE Results; TP53_p.S127Y; A1101
CTYYPALNK

SEQ ID NO: 28839 - protein, 10 aa, Homo sapiens
  AACR GENIE Results; TP53_p.S127Y; A2402
TYYPALNKMF

SEQ ID NO: 28840 - protein, 9 aa, Homo sapiens
  AACR GENIE Results; TP53_p.S127Y; A2402
YYPALNKMF

SEQ ID NO: 28841 - protein, 9 aa, Homo sapiens
  AACR GENIE Results; TP53_p.S127Y; A2402
TYYPALNKM

SEQ ID NO: 28842 - protein, 11 aa, Homo sapiens
  AACR GENIE Results; TP53_p.S127Y; A0101
GTAKSVTCTYY

SEQ ID NO: 28843 - protein, 10 aa, Homo sapiens
  AACR GENIE Results; TP53_p.S127Y; B1501
TAKSVTCTYY

SEQ ID NO: 28844 - protein, 9 aa, Homo sapiens
  AACR GENIE Results; TP53_p.S127Y; B0702
TYYPALNKM

SEQ ID NO: 28845 - protein, 9 aa, Homo sapiens
  AACR GENIE Results; TP53_p.S127Y; C0702
YYPALNKMF

SEQ ID NO: 28846 - protein, 8 aa, Homo sapiens
  AACR GENIE Results; TP53_p.S127Y; B3501
YPALNKMF

SEQ ID NO: 28847 - protein, 9 aa, Homo sapiens
  AACR GENIE Results; TP53_p.S127Y; C0602
YYPALNKMF

SEQ ID NO: 28848 - protein, 9 aa, Homo sapiens
  AACR GENIE Results; TP53_p.S127Y; C0602
TYYPALNKM

SEQ ID NO: 28849 - protein, 8 aa, Homo sapiens
  AACR GENIE Results; TP53_p.S127Y; A0301
TYYPALNK

SEQ ID NO: 28850 - protein, 9 aa, Homo sapiens
  AACR GENIE Results; TP53_p.S127Y; C0702
TYYPALNKM

SEQ ID NO: 28851 - protein, 8 aa, Homo sapiens
  AACR GENIE Results; TP53_p.S127Y; B0801
YPALNKMF

SEQ ID NO: 28852 - protein, 10 aa, Homo sapiens
  AACR GENIE Results; TP53_p.S127Y; C0202
TAKSVTCTYY

SEQ ID NO: 28853 - protein, 9 aa, Homo sapiens
  AACR GENIE Results; TP53_p.S215G; C0702
FRHGVVVPY

SEQ ID NO: 28854 - protein, 9 aa, Homo sapiens
  AACR GENIE Results; TP53_p.S215G; C1203
NTFRHGVVV

SEQ ID NO: 28855 - protein, 9 aa, Homo sapiens
  AACR GENIE Results; TP53_p.S215G; C0602
FRHGVVVPY

SEQ ID NO: 28856 - protein, 9 aa, Homo sapiens
  AACR GENIE Results; TP53_p.S215I; C1203
NTFRHIVVV

SEQ ID NO: 28857 - protein, 8 aa, Homo sapiens
  AACR GENIE Results; TP53_p.S215I; C1203
NTFRHIVV

SEQ ID NO: 28858 - protein, 9 aa, Homo sapiens
  AACR GENIE Results; TP53_p.S215I; C1502
NTFRHIVVV

SEQ ID NO: 28859 - protein, 9 aa, Homo sapiens
  AACR GENIE Results; TP53_p.S215I; C1502
RNTFRHIVV

SEQ ID NO: 28860 - protein, 9 aa, Homo sapiens
  AACR GENIE Results; TP53_p.S215I; C0702
FRHIVVVPY

SEQ ID NO: 28861 - protein, 9 aa, Homo sapiens
  AACR GENIE Results; TP53_p.S241F; C1402
HYNYMCNSF

SEQ ID NO: 28862 - protein, 10 aa, Homo sapiens
  AACR GENIE Results; TP53_p.S241F; A6801
NSFCMGGMNR

SEQ ID NO: 28863 - protein, 9 aa, Homo sapiens
  AACR GENIE Results; TP53_p.S241F; A2402
HYNYMCNSF

SEQ ID NO: 28864 - protein, 8 aa, Homo sapiens
  AACR GENIE Results; TP53_p.S241F; A3303
FCMGGMNR

SEQ ID NO: 28865 - protein, 9 aa, Homo sapiens
  AACR GENIE Results; TP53_p.S241F; A3303
SFCMGGMNR

SEQ ID NO: 28866 - protein, 9 aa, Homo sapiens
  AACR GENIE Results; TP53_p.S241F; A2301
HYNYMCNSF

SEQ ID NO: 28867 - protein, 9 aa, Homo sapiens
  AACR GENIE Results; TP53_p.S241T; A1101
STCMGGMNR

SEQ ID NO: 28868 - protein, 10 aa, Homo sapiens
  AACR GENIE Results; TP53_p.S241Y; A6801
NSYCMGGMNR

SEQ ID NO: 28869 - protein, 9 aa, Homo sapiens
  AACR GENIE Results; TP53_p.S90Pfs*33; B5501
LPRKPTRAA

SEQ ID NO: 28870 - protein, 10 aa, Homo sapiens
  AACR GENIE Results; TP53_p.S90Pfs*33; B0702
APAPPGPCHL

SEQ ID NO: 28871 - protein, 9 aa, Homo sapiens
  AACR GENIE Results; TP53_p.S90Pfs*33; A3001
SCILGQPSL

SEQ ID NO: 28872 - protein, 9 aa, Homo sapiens
  AACR GENIE Results; TP53_p.S90Pfs*33; C0303
SCILGQPSL

SEQ ID NO: 28873 - protein, 9 aa, Homo sapiens
  AACR GENIE Results; TP53_p.S90Pfs*33; B0702
APAPPGPCH

SEQ ID NO: 28874 - protein, 9 aa, Homo sapiens
  AACR GENIE Results; TP53_p.S90Pfs*33; C0304
SCILGQPSL

SEQ ID NO: 28875 - protein, 9 aa, Homo sapiens
  AACR GENIE Results; TP53_p.S90Pfs*33; B2702
TRAATVSVW

SEQ ID NO: 28876 - protein, 9 aa, Homo sapiens
  AACR GENIE Results; TP53_p.S90Pfs*33; B1501
SCILGQPSL

SEQ ID NO: 28877 - protein, 9 aa, Homo sapiens
  AACR GENIE Results; TP53_p.S90Pfs*33; B0702
LPRKPTRAA

SEQ ID NO: 28878 - protein, 9 aa, Homo sapiens
  AACR GENIE Results; TP53_p.S90Pfs*33; B0702
SCILGQPSL

SEQ ID NO: 28879 - protein, 10 aa, Homo sapiens
  AACR GENIE Results; TP53_p.S90Pfs*33; A1101
ASCILGQPSL

SEQ ID NO: 28880 - protein, 9 aa, Homo sapiens
  AACR GENIE Results; TP53_p.S90Pfs*33; A0201
SCILGQPSL

SEQ ID NO: 28881 - protein, 9 aa, Homo sapiens
  AACR GENIE Results; TP53_p.S90Pfs*33; C1601
SCILGQPSL

SEQ ID NO: 28882 - protein, 11 aa, Homo sapiens
  AACR GENIE Results; TP53_p.S90Pfs*33; B5501
LPRKPTRAATV

SEQ ID NO: 28883 - protein, 9 aa, Homo sapiens
  AACR GENIE Results; TP53_p.S90Pfs*33; B0801
SCILGQPSL

SEQ ID NO: 28884 - protein, 9 aa, Homo sapiens
  AACR GENIE Results; TP53_p.S90Pfs*33; B3501
APAPPGPCH

SEQ ID NO: 28885 - protein, 9 aa, Homo sapiens
  AACR GENIE Results; TP53_p.S90Pfs*33; B1302
SCILGQPSL

SEQ ID NO: 28886 - protein, 11 aa, Homo sapiens
  AACR GENIE Results; TP53_p.S90Pfs*33; B0702
LPRKPTRAATV

SEQ ID NO: 28887 - protein, 9 aa, Homo sapiens
  AACR GENIE Results; TP53_p.S90Pfs*33; B4001
SCILGQPSL

SEQ ID NO: 28888 - protein, 9 aa, Homo sapiens
  AACR GENIE Results; TP53_p.S90Pfs*33; B0702
APPGPCHLL

SEQ ID NO: 28889 - protein, 9 aa, Homo sapiens
  AACR GENIE Results; TP53_p.S90Pfs*33; B3801
TRAATVSVW

SEQ ID NO: 28890 - protein, 9 aa, Homo sapiens
  AACR GENIE Results; TP53_p.S90Pfs*33; B3501
SCILGQPSL

SEQ ID NO: 28891 - protein, 8 aa, Homo sapiens
  AACR GENIE Results; TP53_p.S90Pfs*33; B5701
RAATVSVW

SEQ ID NO: 28892 - protein, 9 aa, Homo sapiens
  AACR GENIE Results; TP53_p.T118Qfs*5; A0201
FLHSGQPSL

SEQ ID NO: 28893 - protein, 9 aa, Homo sapiens
  AACR GENIE Results; TP53_p.T118Qfs*5; B1302
FLHSGQPSL

SEQ ID NO: 28894 - protein, 8 aa, Homo sapiens
  AACR GENIE Results; TP53_p.T118Qfs*5; B3901
LHSGQPSL

SEQ ID NO: 28895 - protein, 9 aa, Homo sapiens
  AACR GENIE Results; TP53_p.T118Qfs*5; C0304
FLHSGQPSL

SEQ ID NO: 28896 - protein, 9 aa, Homo sapiens
  AACR GENIE Results; TP53_p.T118Qfs*5; C0102
FLHSGQPSL

SEQ ID NO: 28897 - protein, 9 aa, Homo sapiens
  AACR GENIE Results; TP53_p.T118Qfs*5; B3503
FLHSGQPSL

SEQ ID NO: 28898 - protein, 9 aa, Homo sapiens
  AACR GENIE Results; TP53_p.T118Qfs*5; A3001
FLHSGQPSL

SEQ ID NO: 28899 - protein, 9 aa, Homo sapiens
  AACR GENIE Results; TP53_p.T118Qfs*5; B3901
FLHSGQPSL

SEQ ID NO: 28900 - protein, 9 aa, Homo sapiens
  AACR GENIE Results; TP53_p.T118Qfs*5; C0303
FLHSGQPSL

SEQ ID NO: 28901 - protein, 9 aa, Homo sapiens
  AACR GENIE Results; TP53_p.T118Qfs*5; B1501
FLHSGQPSL

SEQ ID NO: 28902 - protein, 8 aa, Homo sapiens
  AACR GENIE Results; TP53_p.T118Qfs*5; B3801
LHSGQPSL

SEQ ID NO: 28903 - protein, 9 aa, Homo sapiens
  AACR GENIE Results; TP53_p.T118Qfs*5; B0801
FLHSGQPSL

SEQ ID NO: 28904 - protein, 9 aa, Homo sapiens
  AACR GENIE Results; TP53_p.T118Qfs*5; B3801
FLHSGQPSL

SEQ ID NO: 28905 - protein, 9 aa, Homo sapiens
  AACR GENIE Results; TP53_p.T118Qfs*5; B4002
FLHSGQPSL

SEQ ID NO: 28906 - protein, 9 aa, Homo sapiens
  AACR GENIE Results; TP53_p.T118Qfs*5; C1701
FLHSGQPSL

SEQ ID NO: 28907 - protein, 9 aa, Homo sapiens
  AACR GENIE Results; TP53_p.T118Qfs*5; B5001
FLHSGQPSL

SEQ ID NO: 28908 - protein, 9 aa, Homo sapiens
  AACR GENIE Results; TP53_p.T118Qfs*5; A6802
FLHSGQPSL

SEQ ID NO: 28909 - protein, 9 aa, Homo sapiens
  AACR GENIE Results; TP53_p.T118Qfs*5; B3502
FLHSGQPSL

SEQ ID NO: 28910 - protein, 9 aa, Homo sapiens
  AACR GENIE Results; TP53_p.T118Qfs*5; B5801
FLHSGQPSL

SEQ ID NO: 28911 - protein, 9 aa, Homo sapiens
  AACR GENIE Results; TP53_p.T118Qfs*5; B3501
FLHSGQPSL

SEQ ID NO: 28912 - protein, 9 aa, Homo sapiens
  AACR GENIE Results; TP53_p.T118Qfs*5; C1402
FLHSGQPSL

SEQ ID NO: 28913 - protein, 9 aa, Homo sapiens
  AACR GENIE Results; TP53_p.T118Qfs*5; C0202
FLHSGQPSL

SEQ ID NO: 28914 - protein, 9 aa, Homo sapiens
  AACR GENIE Results; TP53_p.T118Qfs*5; B0702
FLHSGQPSL

SEQ ID NO: 28915 - protein, 9 aa, Homo sapiens
  AACR GENIE Results; TP53_p.T118Qfs*5; C0802
FLHSGQPSL

SEQ ID NO: 28916 - protein, 9 aa, Homo sapiens
  AACR GENIE Results; TP53_p.T118Qfs*5; C0704
FLHSGQPSL

SEQ ID NO: 28917 - protein, 9 aa, Homo sapiens
  AACR GENIE Results; TP53_p.T118Qfs*5; C1502
FLHSGQPSL

SEQ ID NO: 28918 - protein, 9 aa, Homo sapiens
  AACR GENIE Results; TP53_p.T118Qfs*5; B4001
FLHSGQPSL

SEQ ID NO: 28919 - protein, 8 aa, Homo sapiens
  AACR GENIE Results; TP53_p.T118Qfs*5; B4002
LHSGQPSL

SEQ ID NO: 28920 - protein, 9 aa, Homo sapiens
  AACR GENIE Results; TP53_p.T118Qfs*5; C1601
FLHSGQPSL

SEQ ID NO: 28921 - protein, 9 aa, Homo sapiens
  AACR GENIE Results; TP53_p.T118Qfs*5; A2301
FLHSGQPSL

SEQ ID NO: 28922 - protein, 9 aa, Homo sapiens
  AACR GENIE Results; TP53_p.T118Qfs*5; B2705
FLHSGQPSL

SEQ ID NO: 28923 - protein, 9 aa, Homo sapiens
  AACR GENIE Results; TP53_p.T118Qfs*5; A0301
FLHSGQPSL

SEQ ID NO: 28924 - protein, 9 aa, Homo sapiens
  AACR GENIE Results; TP53_p.T118Qfs*5; C0401
FLHSGQPSL

SEQ ID NO: 28925 - protein, 8 aa, Homo sapiens
  AACR GENIE Results; TP53_p.T118Qfs*5; B2705
LHSGQPSL

SEQ ID NO: 28926 - protein, 9 aa, Homo sapiens
  AACR GENIE Results; TP53_p.T118Qfs*5; C0501
FLHSGQPSL

SEQ ID NO: 28927 - protein, 10 aa, Homo sapiens
  AACR GENIE Results; TP53_p.T118Qfs*5; A3101
GFLHSGQPSL

SEQ ID NO: 28928 - protein, 10 aa, Homo sapiens
  AACR GENIE Results; TP53_p.T118Qfs*5; A2902
GFLHSGQPSL

SEQ ID NO: 28929 - protein, 10 aa, Homo sapiens
  AACR GENIE Results; TP53_p.T118Qfs*5; A2301
GFLHSGQPSL

SEQ ID NO: 28930 - protein, 9 aa, Homo sapiens
  AACR GENIE Results; TP53_p.T118Qfs*5; A2402
FLHSGQPSL

SEQ ID NO: 28931 - protein, 9 aa, Homo sapiens
  AACR GENIE Results; TP53_p.T118Qfs*5; A2601
FLHSGQPSL

SEQ ID NO: 28932 - protein, 9 aa, Homo sapiens
  AACR GENIE Results; TP53_p.T118Qfs*5; C1203
FLHSGQPSL

SEQ ID NO: 28933 - protein, 10 aa, Homo sapiens
  AACR GENIE Results; TP53_p.T118Qfs*5; B4002
GFLHSGQPSL

SEQ ID NO: 28934 - protein, 9 aa, Homo sapiens
  AACR GENIE Results; TP53_p.T118Qfs*5; A6801
FLHSGQPSL

SEQ ID NO: 28935 - protein, 9 aa, Homo sapiens
  AACR GENIE Results; TP53_p.T118Qfs*5; A2902
FLHSGQPSL

SEQ ID NO: 28936 - protein, 8 aa, Homo sapiens
  AACR GENIE Results; TP53_p.T118Qfs*5; B0702
LHSGQPSL

SEQ ID NO: 28937 - protein, 9 aa, Homo sapiens
  AACR GENIE Results; TP53_p.T118Qfs*5; B5701
FLHSGQPSL

SEQ ID NO: 28938 - protein, 10 aa, Homo sapiens
  AACR GENIE Results; TP53_p.T118Qfs*5; A3001
GFLHSGQPSL

SEQ ID NO: 28939 - protein, 8 aa, Homo sapiens
  AACR GENIE Results; TP53_p.T118Qfs*5; B3503
LHSGQPSL

SEQ ID NO: 28940 - protein, 10 aa, Homo sapiens
  AACR GENIE Results; TP53_p.T118Qfs*5; C1402
GFLHSGQPSL

SEQ ID NO: 28941 - protein, 9 aa, Homo sapiens
  AACR GENIE Results; TP53_p.T118Qfs*5; B1402
FLHSGQPSL

SEQ ID NO: 28942 - protein, 9 aa, Homo sapiens
  AACR GENIE Results; TP53_p.T118Qfs*5; B5101
FLHSGQPSL

SEQ ID NO: 28943 - protein, 9 aa, Homo sapiens
  AACR GENIE Results; TP53_p.T125K; B1501
TAKSVTCKY

SEQ ID NO: 28944 - protein, 10 aa, Homo sapiens
  AACR GENIE Results; TP53_p.T125K; A2402
KYSPALNKMF

SEQ ID NO: 28945 - protein, 9 aa, Homo sapiens
  AACR GENIE Results; TP53_p.T125K; A1101
GTAKSVTCK

SEQ ID NO: 28946 - protein, 9 aa, Homo sapiens
  AACR GENIE Results; TP53_p.T125K; C0202
TAKSVTCKY

SEQ ID NO: 28947 - protein, 9 aa, Homo sapiens
  AACR GENIE Results; TP53_p.T125K; A2402
KYSPALNKM

SEQ ID NO: 28948 - protein, 9 aa, Homo sapiens
  AACR GENIE Results; TP53_p.T125K; A0301
GTAKSVTCK

SEQ ID NO: 28949 - protein, 9 aa, Homo sapiens
  AACR GENIE Results; TP53_p.T125K; B3501
TAKSVTCKY

SEQ ID NO: 28950 - protein, 10 aa, Homo sapiens
  AACR GENIE Results; TP53_p.T125K; A0301
TCKYSPALNK

SEQ ID NO: 28951 - protein, 9 aa, Homo sapiens
  AACR GENIE Results; TP53_p.T125K; C0602
KYSPALNKM

SEQ ID NO: 28952 - protein, 10 aa, Homo sapiens
  AACR GENIE Results; TP53_p.T125K; B1501
GTAKSVTCKY

SEQ ID NO: 28953 - protein, 9 aa, Homo sapiens
  AACR GENIE Results; TP53_p.T125K; A2601
TAKSVTCKY

SEQ ID NO: 28954 - protein, 10 aa, Homo sapiens
  AACR GENIE Results; TP53_p.T125K; A0301
GTAKSVTCKY

SEQ ID NO: 28955 - protein, 10 aa, Homo sapiens
  AACR GENIE Results; TP53_p.T125K; A2601
GTAKSVTCKY

SEQ ID NO: 28956 - protein, 9 aa, Homo sapiens
  AACR GENIE Results; TP53_p.T140Pfs*30; B5501
IPHPRPAPA

SEQ ID NO: 28957 - protein, 9 aa, Homo sapiens
  AACR GENIE Results; TP53_p.T140Pfs*30; B5501
HPRPAPASA

SEQ ID NO: 28958 - protein, 8 aa, Homo sapiens
  AACR GENIE Results; TP53_p.T140Pfs*30; B5501
IPHPRPAP

SEQ ID NO: 28959 - protein, 9 aa, Homo sapiens
  AACR GENIE Results; TP53_p.T140Pfs*30; B0702
APWPSTSSH

SEQ ID NO: 28960 - protein, 9 aa, Homo sapiens
  AACR GENIE Results; TP53_p.T140Pfs*30; A3303
SCGLIPHPR

SEQ ID NO: 28961 - protein, 9 aa, Homo sapiens
  AACR GENIE Results; TP53_p.T140Pfs*30; B0702
HPRPAPASA

SEQ ID NO: 28962 - protein, 9 aa, Homo sapiens
  AACR GENIE Results; TP53_p.T140Pfs*30; B0801
IPHPRPAPA

SEQ ID NO: 28963 - protein, 9 aa, Homo sapiens
  AACR GENIE Results; TP53_p.T140Pfs*30; A0201
GLIPHPRPA

SEQ ID NO: 28964 - protein, 10 aa, Homo sapiens
  AACR GENIE Results; TP53_p.T140Pfs*30; A0201
LIPHPRPAPA

SEQ ID NO: 28965 - protein, 9 aa, Homo sapiens
  AACR GENIE Results; TP53_p.T140Pfs*30; B3501
APWPSTSSH

SEQ ID NO: 28966 - protein, 9 aa, Homo sapiens
  AACR GENIE Results; TP53_p.T140Pfs*30; B0702
IPHPRPAPA

SEQ ID NO: 28967 - protein, 9 aa, Homo sapiens
  AACR GENIE Results; TP53_p.T140Pfs*30; A3101
SCGLIPHPR

SEQ ID NO: 28968 - protein, 8 aa, Homo sapiens
  AACR GENIE Results; TP53_p.T140Pfs*30; B0702
IPHPRPAP

SEQ ID NO: 28969 - protein, 9 aa, Homo sapiens
  AACR GENIE Results; TP53_p.T140Pfs*30; A0201
IPHPRPAPA

SEQ ID NO: 28970 - protein, 11 aa, Homo sapiens
  AACR GENIE Results; TP53_p.T140Pfs*30; B3501
APWPSTSSHST

SEQ ID NO: 28971 - protein, 8 aa, Homo sapiens
  AACR GENIE Results; TP53_p.T155I; B5101
TPPPGIRV

SEQ ID NO: 28972 - protein, 10 aa, Homo sapiens
  AACR GENIE Results; TP53_p.T155I; A1101
STPPPGIRVR

SEQ ID NO: 28973 - protein, 11 aa, Homo sapiens
  AACR GENIE Results; TP53_p.T155I; A6801
DSTPPPGIRVR

SEQ ID NO: 28974 - protein, 8 aa, Homo sapiens
  AACR GENIE Results; TP53_p.T155I; B5101
DSTPPPGI

SEQ ID NO: 28975 - protein, 10 aa, Homo sapiens
  AACR GENIE Results; TP53_p.T155I; A6801
STPPPGIRVR

SEQ ID NO: 28976 - protein, 9 aa, Homo sapiens
  AACR GENIE Results; TP53_p.T155I; A6801
DSTPPPGIR

SEQ ID NO: 28977 - protein, 9 aa, Homo sapiens
  AACR GENIE Results; TP53_p.T155I; A6801
TPPPGIRVR

SEQ ID NO: 28978 - protein, 9 aa, Homo sapiens
  AACR GENIE Results; TP53_p.T155I; A1101
STPPPGIRV

SEQ ID NO: 28979 - protein, 10 aa, Homo sapiens
  AACR GENIE Results; TP53_p.T155I; A6801
DSTPPPGIRV

SEQ ID NO: 28980 - protein, 9 aa, Homo sapiens
  AACR GENIE Results; TP53_p.T155I; B4403
VDSTPPPGI

SEQ ID NO: 28981 - protein, 8 aa, Homo sapiens
  AACR GENIE Results; TP53_p.T155P; B5101
TPPPGPRV

SEQ ID NO: 28982 - protein, 9 aa, Homo sapiens
  AACR GENIE Results; TP53_p.T155P; A0201
STPPPGPRV

SEQ ID NO: 28983 - protein, 9 aa, Homo sapiens
  AACR GENIE Results; TP53_p.T155P; A1101
STPPPGPRV

SEQ ID NO: 28984 - protein, 9 aa, Homo sapiens
  AACR GENIE Results; TP53_p.T155P; B0702
GPRVRAMAI

SEQ ID NO: 28985 - protein, 10 aa, Homo sapiens
  AACR GENIE Results; TP53_p.T155P; A1101
STPPPGPRVR

SEQ ID NO: 28986 - protein, 9 aa, Homo sapiens
  AACR GENIE Results; TP53_p.T211I; A2301
EYLDDRNIF

SEQ ID NO: 28987 - protein, 9 aa, Homo sapiens
  AACR GENIE Results; TP53_p.T211I; A2402
EYLDDRNIF

SEQ ID NO: 28988 - protein, 8 aa, Homo sapiens
  AACR GENIE Results; TP53_p.T211I; C0501
YLDDRNIF

SEQ ID NO: 28989 - protein, 9 aa, Homo sapiens
  AACR GENIE Results; TP53_p.T211I; B1402
DRNIFRHSV

SEQ ID NO: 28990 - protein, 10 aa, Homo sapiens
  AACR GENIE Results; TP53_p.T211I; B4403
VEYLDDRNIF

SEQ ID NO: 28991 - protein, 9 aa, Homo sapiens
  AACR GENIE Results; TP53_p.T211I; A0201
YLDDRNIFR

SEQ ID NO: 28992 - protein, 8 aa, Homo sapiens
  AACR GENIE Results; TP53_p.T211I; C0802
YLDDRNIF

SEQ ID NO: 28993 - protein, 8 aa, Homo sapiens
  AACR GENIE Results; TP53_p.T211I; C0401
YLDDRNIF

SEQ ID NO: 28994 - protein, 9 aa, Homo sapiens
  AACR GENIE Results; TP53_p.T211I; C1502
RNIFRHSVV

SEQ ID NO: 28995 - protein, 10 aa, Homo sapiens
  AACR GENIE Results; TP53_p.T211I; A2301
VEYLDDRNIF

SEQ ID NO: 28996 - protein, 10 aa, Homo sapiens
  AACR GENIE Results; TP53_p.T211I; A3101
EYLDDRNIFR

SEQ ID NO: 28997 - protein, 8 aa, Homo sapiens
  AACR GENIE Results; TP53_p.V122Dfs*26; C0102
VLPTGQDL

SEQ ID NO: 28998 - protein, 9 aa, Homo sapiens
  AACR GENIE Results; TP53_p.V122Dfs*26; B3501
LPCPQQDVL

SEQ ID NO: 28999 - protein, 11 aa, Homo sapiens
  AACR GENIE Results; TP53_p.V122Dfs*26; A0201
VLPTGQDLPCA

SEQ ID NO: 29000 - protein, 9 aa, Homo sapiens
  AACR GENIE Results; TP53_p.V122Dfs*26; C1203
TAKSDLHVL

SEQ ID NO: 29001 - protein, 9 aa, Homo sapiens
  AACR GENIE Results; TP53_p.V122Dfs*26; B3501
LPTGQDLPC

SEQ ID NO: 29002 - protein, 9 aa, Homo sapiens
  AACR GENIE Results; TP53_p.V122Dfs*26; C1601
TAKSDLHVL

SEQ ID NO: 29003 - protein, 9 aa, Homo sapiens
  AACR GENIE Results; TP53_p.V122Dfs*26; B0801
TAKSDLHVL

SEQ ID NO: 29004 - protein, 9 aa, Homo sapiens
  AACR GENIE Results; TP53_p.V122Dfs*26; C0202
TAKSDLHVL

SEQ ID NO: 29005 - protein, 9 aa, Homo sapiens
  AACR GENIE Results; TP53_p.V122Dfs*26; B0702
LPCPQQDVL

SEQ ID NO: 29006 - protein, 8 aa, Homo sapiens
  AACR GENIE Results; TP53_p.V143A; B5701
KTCPAQLW

SEQ ID NO: 29007 - protein, 9 aa, Homo sapiens
  AACR GENIE Results; TP53_p.V143A; C1502
KTCPAQLWV

SEQ ID NO: 29008 - protein, 8 aa, Homo sapiens
  AACR GENIE Results; TP53_p.V143M; B5701
KTCPMQLW

SEQ ID NO: 29009 - protein, 10 aa, Homo sapiens
  AACR GENIE Results; TP53_p.V157A; A1101
STPPPGTRAR

SEQ ID NO: 29010 - protein, 11 aa, Homo sapiens
  AACR GENIE Results; TP53_p.V157A; A6801
DSTPPPGTRAR

SEQ ID NO: 29011 - protein, 10 aa, Homo sapiens
  AACR GENIE Results; TP53_p.V157A; A6801
STPPPGTRAR

SEQ ID NO: 29012 - protein, 9 aa, Homo sapiens
  AACR GENIE Results; TP53_p.V157A; A0301
RARAMAIYK

SEQ ID NO: 29013 - protein, 10 aa, Homo sapiens
  AACR GENIE Results; TP53_p.V157A; A3101
STPPPGTRAR

SEQ ID NO: 29014 - protein, 9 aa, Homo sapiens
  AACR GENIE Results; TP53_p.V157F; A2601
STPPPGTRF

SEQ ID NO: 29015 - protein, 9 aa, Homo sapiens
  AACR GENIE Results; TP53_p.V157F; B1501
STPPPGTRF

SEQ ID NO: 29016 - protein, 9 aa, Homo sapiens
  AACR GENIE Results; TP53_p.V157F; B5801
STPPPGTRF

SEQ ID NO: 29017 - protein, 9 aa, Homo sapiens
  AACR GENIE Results; TP53_p.V157F; A1101
STPPPGTRF

SEQ ID NO: 29018 - protein, 9 aa, Homo sapiens
  AACR GENIE Results; TP53_p.V157F; C0202
STPPPGTRF

SEQ ID NO: 29019 - protein, 9 aa, Homo sapiens
  AACR GENIE Results; TP53_p.V157F; B5701
STPPPGTRF

SEQ ID NO: 29020 - protein, 11 aa, Homo sapiens
  AACR GENIE Results; TP53_p.V157F; A3301
DSTPPPGTRFR

SEQ ID NO: 29021 - protein, 8 aa, Homo sapiens
  AACR GENIE Results; TP53_p.V157F; B3501
TPPPGTRF

SEQ ID NO: 29022 - protein, 9 aa, Homo sapiens
  AACR GENIE Results; TP53_p.V157F; B0702
STPPPGTRF

SEQ ID NO: 29023 - protein, 9 aa, Homo sapiens
  AACR GENIE Results; TP53_p.V157F; B3901
STPPPGTRF

SEQ ID NO: 29024 - protein, 10 aa, Homo sapiens
  AACR GENIE Results; TP53_p.V157F; A3101
STPPPGTRFR

SEQ ID NO: 29025 - protein, 8 aa, Homo sapiens
  AACR GENIE Results; TP53_p.V157F; B0702
TPPPGTRF

SEQ ID NO: 29026 - protein, 10 aa, Homo sapiens
  AACR GENIE Results; TP53_p.V157F; A6801
DSTPPPGTRF

SEQ ID NO: 29027 - protein, 11 aa, Homo sapiens
  AACR GENIE Results; TP53_p.V157F; A2301
VDSTPPPGTRF

SEQ ID NO: 29028 - protein, 8 aa, Homo sapiens
  AACR GENIE Results; TP53_p.V157F; B5101
TPPPGTRF

SEQ ID NO: 29029 - protein, 9 aa, Homo sapiens
  AACR GENIE Results; TP53_p.V157F; C0102
STPPPGTRF

SEQ ID NO: 29030 - protein, 8 aa, Homo sapiens
  AACR GENIE Results; TP53_p.V172D; B1302
SQHMTEDV

SEQ ID NO: 29031 - protein, 9 aa, Homo sapiens
  AACR GENIE Results; TP53_p.V172F; B1501
KQSQHMTEF

SEQ ID NO: 29032 - protein, 11 aa, Homo sapiens
  AACR GENIE Results; TP53_p.V172F; A2402
IYKQSQHMTEF

SEQ ID NO: 29033 - protein, 9 aa, Homo sapiens
  AACR GENIE Results; TP53_p.V172F; A3201
KQSQHMTEF

SEQ ID NO: 29034 - protein, 11 aa, Homo sapiens
  AACR GENIE Results; TP53_p.V172F; A2301
IYKQSQHMTEF

SEQ ID NO: 29035 - protein, 9 aa, Homo sapiens
  AACR GENIE Results; TP53_p.V172F; C0202
KQSQHMTEF

SEQ ID NO: 29036 - protein, 9 aa, Homo sapiens
  AACR GENIE Results; TP53_p.V172F; A3101
SQHMTEFVR

SEQ ID NO: 29037 - protein, 11 aa, Homo sapiens
  AACR GENIE Results; TP53_p.V172F; A3101
QSQHMTEFVRR

SEQ ID NO: 29038 - protein, 8 aa, Homo sapiens
  AACR GENIE Results; TP53_p.V172F; A3101
HMTEFVRR

SEQ ID NO: 29039 - protein, 9 aa, Homo sapiens
  AACR GENIE Results; TP53_p.V173G; A3101
SQHMTEVGR

SEQ ID NO: 29040 - protein, 10 aa, Homo sapiens
  AACR GENIE Results; TP53_p.V173G; A3101
QSQHMTEVGR

SEQ ID NO: 29041 - protein, 10 aa, Homo sapiens
  AACR GENIE Results; TP53_p.V173G; A6801
QSQHMTEVGR

SEQ ID NO: 29042 - protein, 9 aa, Homo sapiens
  AACR GENIE Results; TP53_p.V173G; B1501
SQHMTEVGR

SEQ ID NO: 29043 - protein, 9 aa, Homo sapiens
  AACR GENIE Results; TP53_p.V173G; B1302
SQHMTEVGR

SEQ ID NO: 29044 - protein, 8 aa, Homo sapiens
  AACR GENIE Results; TP53_p.V173L; B1501
SQHMTEVL

SEQ ID NO: 29045 - protein, 9 aa, Homo sapiens
  AACR GENIE Results; TP53_p.V173L; A3101
SQHMTEVLR

SEQ ID NO: 29046 - protein, 10 aa, Homo sapiens
  AACR GENIE Results; TP53_p.V173L; A6801
QSQHMTEVLR

SEQ ID NO: 29047 - protein, 10 aa, Homo sapiens
  AACR GENIE Results; TP53_p.V173L; A3101
QSQHMTEVLR

SEQ ID NO: 29048 - protein, 8 aa, Homo sapiens
  AACR GENIE Results; TP53_p.V173L; B3901
SQHMTEVL

SEQ ID NO: 29049 - protein, 8 aa, Homo sapiens
  AACR GENIE Results; TP53_p.V173L; B1302
SQHMTEVL

SEQ ID NO: 29050 - protein, 8 aa, Homo sapiens
  AACR GENIE Results; TP53_p.V173L; B4002
SQHMTEVL

SEQ ID NO: 29051 - protein, 10 aa, Homo sapiens
  AACR GENIE Results; TP53_p.V173L; A3303
QSQHMTEVLR

SEQ ID NO: 29052 - protein, 8 aa, Homo sapiens
  AACR GENIE Results; TP53_p.V173L; B1402
SQHMTEVL

SEQ ID NO: 29053 - protein, 8 aa, Homo sapiens
  AACR GENIE Results; TP53_p.V173L; B3801
SQHMTEVL

SEQ ID NO: 29054 - protein, 8 aa, Homo sapiens
  AACR GENIE Results; TP53_p.V173M; B1501
SQHMTEVM

SEQ ID NO: 29055 - protein, 8 aa, Homo sapiens
  AACR GENIE Results; TP53_p.V173M; B1502
SQHMTEVM

SEQ ID NO: 29056 - protein, 8 aa, Homo sapiens
  AACR GENIE Results; TP53_p.V173M; B1503
SQHMTEVM

SEQ ID NO: 29057 - protein, 9 aa, Homo sapiens
  AACR GENIE Results; TP53_p.V173M; A3101
SQHMTEVMR

SEQ ID NO: 29058 - protein, 8 aa, Homo sapiens
  AACR GENIE Results; TP53_p.V173M; B3901
SQHMTEVM

SEQ ID NO: 29059 - protein, 8 aa, Homo sapiens
  AACR GENIE Results; TP53_p.V173M; C0801
SQHMTEVM

SEQ ID NO: 29060 - protein, 8 aa, Homo sapiens
  AACR GENIE Results; TP53_p.V173M; B1510
SQHMTEVM

SEQ ID NO: 29061 - protein, 8 aa, Homo sapiens
  AACR GENIE Results; TP53_p.V173M; B1302
SQHMTEVM

SEQ ID NO: 29062 - protein, 8 aa, Homo sapiens
  AACR GENIE Results; TP53_p.V173M; B3906
SQHMTEVM

SEQ ID NO: 29063 - protein, 10 aa, Homo sapiens
  AACR GENIE Results; TP53_p.V173M; A6801
QSQHMTEVMR

SEQ ID NO: 29064 - protein, 8 aa, Homo sapiens
  AACR GENIE Results; TP53_p.V173M; B3501
SQHMTEVM

SEQ ID NO: 29065 - protein, 9 aa, Homo sapiens
  AACR GENIE Results; TP53_p.V197M; B4403
MEGNLRVEY

SEQ ID NO: 29066 - protein, 9 aa, Homo sapiens
  AACR GENIE Results; TP53_p.V197M; B1801
MEGNLRVEY

SEQ ID NO: 29067 - protein, 9 aa, Homo sapiens
  AACR GENIE Results; TP53_p.V197M; B4402
MEGNLRVEY

SEQ ID NO: 29068 - protein, 9 aa, Homo sapiens
  AACR GENIE Results; TP53_p.V197M; B0702
APPQHLIRM

SEQ ID NO: 29069 - protein, 9 aa, Homo sapiens
  AACR GENIE Results; TP53_p.V197M; B1501
MEGNLRVEY

SEQ ID NO: 29070 - protein, 9 aa, Homo sapiens
  AACR GENIE Results; TP53_p.V197M; B3501
MEGNLRVEY

SEQ ID NO: 29071 - protein, 10 aa, Homo sapiens
  AACR GENIE Results; TP53_p.V197M; B1501
RMEGNLRVEY

SEQ ID NO: 29072 - protein, 9 aa, Homo sapiens
  AACR GENIE Results; TP53_p.V197M; C0602
IRMEGNLRV

SEQ ID NO: 29073 - protein, 10 aa, Homo sapiens
  AACR GENIE Results; TP53_p.V197M; B5701
RMEGNLRVEY

SEQ ID NO: 29074 - protein, 9 aa, Homo sapiens
  AACR GENIE Results; TP53_p.V197M; B4001
MEGNLRVEY

SEQ ID NO: 29075 - protein, 9 aa, Homo sapiens
  AACR GENIE Results; TP53_p.V203L; B4403
VEGNLRLEY

SEQ ID NO: 29076 - protein, 9 aa, Homo sapiens
  AACR GENIE Results; TP53_p.V203L; B1801
VEGNLRLEY

SEQ ID NO: 29077 - protein, 9 aa, Homo sapiens
  AACR GENIE Results; TP53_p.V203L; B4402
VEGNLRLEY

SEQ ID NO: 29078 - protein, 9 aa, Homo sapiens
  AACR GENIE Results; TP53_p.V203L; A2301
VEGNLRLEY

SEQ ID NO: 29079 - protein, 10 aa, Homo sapiens
  AACR GENIE Results; TP53_p.V203L; B4403
LEYLDDRNTF

SEQ ID NO: 29080 - protein, 10 aa, Homo sapiens
  AACR GENIE Results; TP53_p.V203L; B1801
LEYLDDRNTF

SEQ ID NO: 29081 - protein, 9 aa, Homo sapiens
  AACR GENIE Results; TP53_p.V203L; B2705
IRVEGNLRL

SEQ ID NO: 29082 - protein, 10 aa, Homo sapiens
  AACR GENIE Results; TP53_p.V203L; B4901
LEYLDDRNTF

SEQ ID NO: 29083 - protein, 10 aa, Homo sapiens
  AACR GENIE Results; TP53_p.V203L; B4001
LEYLDDRNTF

SEQ ID NO: 29084 - protein, 10 aa, Homo sapiens
  AACR GENIE Results; TP53_p.V203L; A3001
LEYLDDRNTF

SEQ ID NO: 29085 - protein, 10 aa, Homo sapiens
  AACR GENIE Results; TP53_p.V203L; A2301
LEYLDDRNTF

SEQ ID NO: 29086 - protein, 8 aa, Homo sapiens
  AACR GENIE Results; TP53_p.V203L; C1601
EGNLRLEY

SEQ ID NO: 29087 - protein, 10 aa, Homo sapiens
  AACR GENIE Results; TP53_p.V203L; B4402
LEYLDDRNTF

SEQ ID NO: 29088 - protein, 10 aa, Homo sapiens
  AACR GENIE Results; TP53_p.V203L; A2902
RVEGNLRLEY

SEQ ID NO: 29089 - protein, 8 aa, Homo sapiens
  AACR GENIE Results; TP53_p.V203L; B0801
EGNLRLEY

SEQ ID NO: 29090 - protein, 9 aa, Homo sapiens
  AACR GENIE Results; TP53_p.V203L; B1501
VEGNLRLEY

SEQ ID NO: 29091 - protein, 10 aa, Homo sapiens
  AACR GENIE Results; TP53_p.V203L; A0101
RVEGNLRLEY

SEQ ID NO: 29092 - protein, 10 aa, Homo sapiens
  AACR GENIE Results; TP53_p.V203L; B5701
RVEGNLRLEY

SEQ ID NO: 29093 - protein, 9 aa, Homo sapiens
  AACR GENIE Results; TP53_p.V203L; A2902
VEGNLRLEY

SEQ ID NO: 29094 - protein, 10 aa, Homo sapiens
  AACR GENIE Results; TP53_p.V203L; B5701
LEYLDDRNTF

SEQ ID NO: 29095 - protein, 10 aa, Homo sapiens
  AACR GENIE Results; TP53_p.V216G; A0201
GVVPYEPPEV

SEQ ID NO: 29096 - protein, 9 aa, Homo sapiens
  AACR GENIE Results; TP53_p.V216G; C0702
FRHSGVVPY

SEQ ID NO: 29097 - protein, 9 aa, Homo sapiens
  AACR GENIE Results; TP53_p.V216G; B2705
FRHSGVVPY

SEQ ID NO: 29098 - protein, 10 aa, Homo sapiens
  AACR GENIE Results; TP53_p.V216G; A3001
GVVPYEPPEV

SEQ ID NO: 29099 - protein, 9 aa, Homo sapiens
  AACR GENIE Results; TP53_p.V216L; B1402
DRNTFRHSL

SEQ ID NO: 29100 - protein, 9 aa, Homo sapiens
  AACR GENIE Results; TP53_p.V216L; C1502
NTFRHSLVV

SEQ ID NO: 29101 - protein, 9 aa, Homo sapiens
  AACR GENIE Results; TP53_p.V216L; A6802
NTFRHSLVV

SEQ ID NO: 29102 - protein, 10 aa, Homo sapiens
  AACR GENIE Results; TP53_p.V216L; A6802
LVVPYEPPEV

SEQ ID NO: 29103 - protein, 10 aa, Homo sapiens
  AACR GENIE Results; TP53_p.V216L; A0201
LVVPYEPPEV

SEQ ID NO: 29104 - protein, 9 aa, Homo sapiens
  AACR GENIE Results; TP53_p.V216L; C0702
FRHSLVVPY

SEQ ID NO: 29105 - protein, 10 aa, Homo sapiens
  AACR GENIE Results; TP53_p.V216L; B5001
LVVPYEPPEV

SEQ ID NO: 29106 - protein, 9 aa, Homo sapiens
  AACR GENIE Results; TP53_p.V216L; C1502
RNTFRHSLV

SEQ ID NO: 29107 - protein, 10 aa, Homo sapiens
  AACR GENIE Results; TP53_p.V216M; A6802
MVVPYEPPEV

SEQ ID NO: 29108 - protein, 10 aa, Homo sapiens
  AACR GENIE Results; TP53_p.V216M; A0201
MVVPYEPPEV

SEQ ID NO: 29109 - protein, 10 aa, Homo sapiens
  AACR GENIE Results; TP53_p.V216M; A0205
MVVPYEPPEV

SEQ ID NO: 29110 - protein, 9 aa, Homo sapiens
  AACR GENIE Results; TP53_p.V216M; B1402
DRNTFRHSM

SEQ ID NO: 29111 - protein, 9 aa, Homo sapiens
  AACR GENIE Results; TP53_p.V216M; B1401
DRNTFRHSM

SEQ ID NO: 29112 - protein, 9 aa, Homo sapiens
  AACR GENIE Results; TP53_p.V216M; A6802
NTFRHSMVV

SEQ ID NO: 29113 - protein, 10 aa, Homo sapiens
  AACR GENIE Results; TP53_p.V216M; B3503
MVVPYEPPEV

SEQ ID NO: 29114 - protein, 9 aa, Homo sapiens
  AACR GENIE Results; TP53_p.V216M; C1502
NTFRHSMVV

SEQ ID NO: 29115 - protein, 10 aa, Homo sapiens
  AACR GENIE Results; TP53_p.V216M; B5001
MVVPYEPPEV

SEQ ID NO: 29116 - protein, 10 aa, Homo sapiens
  AACR GENIE Results; TP53_p.V216M; B3502
MVVPYEPPEV

SEQ ID NO: 29117 - protein, 9 aa, Homo sapiens
  AACR GENIE Results; TP53_p.V216M; C1203
NTFRHSMVV

SEQ ID NO: 29118 - protein, 9 aa, Homo sapiens
  AACR GENIE Results; TP53_p.V218Cfs*29; B5801
TTCVTVPAW

SEQ ID NO: 29119 - protein, 9 aa, Homo sapiens
  AACR GENIE Results; TP53_p.V218Cfs*29; B5701
TTCVTVPAW

SEQ ID NO: 29120 - protein, 9 aa, Homo sapiens
  AACR GENIE Results; TP53_p.V218Cfs*29; A6801
HSVVCPMSR

SEQ ID NO: 29121 - protein, 9 aa, Homo sapiens
  AACR GENIE Results; TP53_p.V218Cfs*29; A6802
STTTTCVTV

SEQ ID NO: 29122 - protein, 11 aa, Homo sapiens
  AACR GENIE Results; TP53_p.V218Cfs*29; A6802
TVPPSTTTTCV

SEQ ID NO: 29123 - protein, 9 aa, Homo sapiens
  AACR GENIE Results; TP53_p.V218Cfs*29; B5101
VPPSTTTTC

SEQ ID NO: 29124 - protein, 9 aa, Homo sapiens
  AACR GENIE Results; TP53_p.V218Cfs*29; A3303
HSVVCPMSR

SEQ ID NO: 29125 - protein, 10 aa, Homo sapiens
  AACR GENIE Results; TP53_p.V218Cfs*29; B5101
VPPSTTTTCV

SEQ ID NO: 29126 - protein, 10 aa, Homo sapiens
  AACR GENIE Results; TP53_p.V218Cfs*29; B0702
VPPSTTTTCV

SEQ ID NO: 29127 - protein, 9 aa, Homo sapiens
  AACR GENIE Results; TP53_p.V218Cfs*29; B5801
STTTTCVTV

SEQ ID NO: 29128 - protein, 9 aa, Homo sapiens
  AACR GENIE Results; TP53_p.V218Cfs*29; B5801
LTVPPSTTT

SEQ ID NO: 29129 - protein, 9 aa, Homo sapiens
  AACR GENIE Results; TP53_p.V218Cfs*29; A6802
SVVCPMSRL

SEQ ID NO: 29130 - protein, 8 aa, Homo sapiens
  AACR GENIE Results; TP53_p.V218Cfs*29; B5101
VPPSTTTT

SEQ ID NO: 29131 - protein, 9 aa, Homo sapiens
  AACR GENIE Results; TP53_p.V218Cfs*29; C1502
STTTTCVTV

SEQ ID NO: 29132 - protein, 9 aa, Homo sapiens
  AACR GENIE Results; TP53_p.V272L; B2705
GRNSFELRV

SEQ ID NO: 29133 - protein, 9 aa, Homo sapiens
  AACR GENIE Results; TP53_p.V272L; C0602
GRNSFELRV

SEQ ID NO: 29134 - protein, 8 aa, Homo sapiens
  AACR GENIE Results; TP53_p.V272L; C1502
RNSFELRV

SEQ ID NO: 29135 - protein, 9 aa, Homo sapiens
  AACR GENIE Results; TP53_p.V272L; A3101
LGRNSFELR

SEQ ID NO: 29136 - protein, 9 aa, Homo sapiens
  AACR GENIE Results; TP53_p.V272M; B2705
GRNSFEMRV

SEQ ID NO: 29137 - protein, 9 aa, Homo sapiens
  AACR GENIE Results; TP53_p.V272M; C0602
GRNSFEMRV

SEQ ID NO: 29138 - protein, 9 aa, Homo sapiens
  AACR GENIE Results; TP53_p.V274A; B2705
GRNSFEVRA

SEQ ID NO: 29139 - protein, 9 aa, Homo sapiens
  AACR GENIE Results; TP53_p.V274F; B2705
GRNSFEVRF

SEQ ID NO: 29140 - protein, 9 aa, Homo sapiens
  AACR GENIE Results; TP53_p.V274F; B2702
GRNSFEVRF

SEQ ID NO: 29141 - protein, 9 aa, Homo sapiens
  AACR GENIE Results; TP53_p.V274F; C0602
GRNSFEVRF

SEQ ID NO: 29142 - protein, 9 aa, Homo sapiens
  AACR GENIE Results; TP53_p.V274F; C0702
GRNSFEVRF

SEQ ID NO: 29143 - protein, 9 aa, Homo sapiens
  AACR GENIE Results; TP53_p.V274F; C0701
GRNSFEVRF

SEQ ID NO: 29144 - protein, 9 aa, Homo sapiens
  AACR GENIE Results; TP53_p.V274L; B2705
GRNSFEVRL

SEQ ID NO: 29145 - protein, 9 aa, Homo sapiens
  AACR GENIE Results; TP53_p.V274L; C0602
GRNSFEVRL

SEQ ID NO: 29146 - protein, 9 aa, Homo sapiens
  AACR GENIE Results; TP53_p.V274L; C0701
GRNSFEVRL

SEQ ID NO: 29147 - protein, 9 aa, Homo sapiens
  AACR GENIE Results; TP53_p.V274L; B2702
GRNSFEVRL

SEQ ID NO: 29148 - protein, 9 aa, Homo sapiens
  AACR GENIE Results; TP53_p.V73Afs*51; C0304
SCILGQPSL

SEQ ID NO: 29149 - protein, 9 aa, Homo sapiens
  AACR GENIE Results; TP53_p.V73Afs*51; B1501
SCILGQPSL

SEQ ID NO: 29150 - protein, 9 aa, Homo sapiens
  AACR GENIE Results; TP53_p.V73Afs*51; B0702
LPRKPTRAA

SEQ ID NO: 29151 - protein, 9 aa, Homo sapiens
  AACR GENIE Results; TP53_p.V73Afs*51; B0702
SCILGQPSL

SEQ ID NO: 29152 - protein, 10 aa, Homo sapiens
  AACR GENIE Results; TP53_p.V73Afs*51; A1101
ASCILGQPSL

SEQ ID NO: 29153 - protein, 9 aa, Homo sapiens
  AACR GENIE Results; TP53_p.V73Afs*51; A0201
SCILGQPSL

SEQ ID NO: 29154 - protein, 9 aa, Homo sapiens
  AACR GENIE Results; TP53_p.V73Afs*51; B0801
SCILGQPSL

SEQ ID NO: 29155 - protein, 11 aa, Homo sapiens
  AACR GENIE Results; TP53_p.V73Afs*51; B0702
LPRKPTRAATV

SEQ ID NO: 29156 - protein, 9 aa, Homo sapiens
  AACR GENIE Results; TP53_p.V73Afs*51; B3501
SCILGQPSL

SEQ ID NO: 29157 - protein, 9 aa, Homo sapiens
  AACR GENIE Results; TP53_p.V73Rfs*76; B3503
LPCPQQDVL

SEQ ID NO: 29158 - protein, 9 aa, Homo sapiens
  AACR GENIE Results; TP53_p.V73Rfs*76; C1402
RFPSGLLAF

SEQ ID NO: 29159 - protein, 8 aa, Homo sapiens
  AACR GENIE Results; TP53_p.V73Rfs*76; C0102
VLPTGQDL

SEQ ID NO: 29160 - protein, 9 aa, Homo sapiens
  AACR GENIE Results; TP53_p.V73Rfs*76; B3503
FPENLPGQL

SEQ ID NO: 29161 - protein, 9 aa, Homo sapiens
  AACR GENIE Results; TP53_p.V73Rfs*76; B3503
LPTGQDLPC

SEQ ID NO: 29162 - protein, 8 aa, Homo sapiens
  AACR GENIE Results; TP53_p.V73Rfs*76; B5101
SPLLAPVI

SEQ ID NO: 29163 - protein, 9 aa, Homo sapiens
  AACR GENIE Results; TP53_p.V73Rfs*76; B3501
SPLLAPVIF

SEQ ID NO: 29164 - protein, 9 aa, Homo sapiens
  AACR GENIE Results; TP53_p.V73Rfs*76; B3501
LPCPQQDVL

SEQ ID NO: 29165 - protein, 9 aa, Homo sapiens
  AACR GENIE Results; TP53_p.V73Rfs*76; C0401
FWDSQVCDL

SEQ ID NO: 29166 - protein, 9 aa, Homo sapiens
  AACR GENIE Results; TP53_p.V73Rfs*76; A2301
RFPSGLLAF

SEQ ID NO: 29167 - protein, 11 aa, Homo sapiens
  AACR GENIE Results; TP53_p.V73Rfs*76; B3501
FPENLPGQLRF

SEQ ID NO: 29168 - protein, 11 aa, Homo sapiens
  AACR GENIE Results; TP53_p.V73Rfs*76; A0201
VLPTGQDLPCA

SEQ ID NO: 29169 - protein, 11 aa, Homo sapiens
  AACR GENIE Results; TP53_p.V73Rfs*76; B3503
CPFPENLPGQL

SEQ ID NO: 29170 - protein, 9 aa, Homo sapiens
  AACR GENIE Results; TP53_p.V73Rfs*76; B1302
GQLRFPSGL

SEQ ID NO: 29171 - protein, 9 aa, Homo sapiens
  AACR GENIE Results; TP53_p.V73Rfs*76; B3501
FPENLPGQL

SEQ ID NO: 29172 - protein, 9 aa, Homo sapiens
  AACR GENIE Results; TP53_p.V73Rfs*76; C0401
FPENLPGQL

SEQ ID NO: 29173 - protein, 9 aa, Homo sapiens
  AACR GENIE Results; TP53_p.V73Rfs*76; A2402
RFPSGLLAF

SEQ ID NO: 29174 - protein, 10 aa, Homo sapiens
  AACR GENIE Results; TP53_p.V73Rfs*76; C0602
LRFPSGLLAF

SEQ ID NO: 29175 - protein, 9 aa, Homo sapiens
  AACR GENIE Results; TP53_p.V73Rfs*76; C0102
RFPSGLLAF

SEQ ID NO: 29176 - protein, 9 aa, Homo sapiens
  AACR GENIE Results; TP53_p.V73Rfs*76; B3501
LPTGQDLPC

SEQ ID NO: 29177 - protein, 8 aa, Homo sapiens
  AACR GENIE Results; TP53_p.V73Rfs*76; A3303
ENLPGQLR

SEQ ID NO: 29178 - protein, 10 aa, Homo sapiens
  AACR GENIE Results; TP53_p.V73Rfs*76; B5501
LPTGQDLPCA

SEQ ID NO: 29179 - protein, 9 aa, Homo sapiens
  AACR GENIE Results; TP53_p.V73Rfs*76; B3503
SPLLAPVIF

SEQ ID NO: 29180 - protein, 9 aa, Homo sapiens
  AACR GENIE Results; TP53_p.V73Rfs*76; B3503
TGGPCTSPL

SEQ ID NO: 29181 - protein, 9 aa, Homo sapiens
  AACR GENIE Results; TP53_p.V73Rfs*76; B1302
GQDLPCAAV

SEQ ID NO: 29182 - protein, 10 aa, Homo sapiens
  AACR GENIE Results; TP53_p.V73Rfs*76; A2301
RFPSGLLAFW

SEQ ID NO: 29183 - protein, 10 aa, Homo sapiens
  AACR GENIE Results; TP53_p.V73Rfs*76; A2402
RFPSGLLAFW

SEQ ID NO: 29184 - protein, 8 aa, Homo sapiens
  AACR GENIE Results; TP53_p.V73Rfs*76; B5501
SPLLAPVI

SEQ ID NO: 29185 - protein, 10 aa, Homo sapiens
  AACR GENIE Results; TP53_p.V73Rfs*76; B2702
LRFPSGLLAF

SEQ ID NO: 29186 - protein, 9 aa, Homo sapiens
  AACR GENIE Results; TP53_p.V73Rfs*76; C0802
FWDSQVCDL

SEQ ID NO: 29187 - protein, 9 aa, Homo sapiens
  AACR GENIE Results; TP53_p.V73Rfs*76; C0802
FPENLPGQL

SEQ ID NO: 29188 - protein, 9 aa, Homo sapiens
  AACR GENIE Results; TP53_p.V73Rfs*76; B5101
LPCPQQDVL

SEQ ID NO: 29189 - protein, 9 aa, Homo sapiens
  AACR GENIE Results; TP53_p.V73Rfs*76; B0702
LPCPQQDVL

SEQ ID NO: 29190 - protein, 10 aa, Homo sapiens
  AACR GENIE Results; TP53_p.V73Rfs*76; C0702
LRFPSGLLAF

SEQ ID NO: 29191 - protein, 10 aa, Homo sapiens
  AACR GENIE Results; TP53_p.V73Rfs*76; C0701
LRFPSGLLAF

SEQ ID NO: 29192 - protein, 9 aa, Homo sapiens
  AACR GENIE Results; TP53_p.V73Wfs*50; C0303
SCILGQPSL

SEQ ID NO: 29193 - protein, 9 aa, Homo sapiens
  AACR GENIE Results; TP53_p.V73Wfs*50; C0304
SCILGQPSL

SEQ ID NO: 29194 - protein, 9 aa, Homo sapiens
  AACR GENIE Results; TP53_p.V73Wfs*50; B1501
SCILGQPSL

SEQ ID NO: 29195 - protein, 9 aa, Homo sapiens
  AACR GENIE Results; TP53_p.V73Wfs*50; B0702
LPRKPTRAA

SEQ ID NO: 29196 - protein, 9 aa, Homo sapiens
  AACR GENIE Results; TP53_p.V73Wfs*50; B0702
SCILGQPSL

SEQ ID NO: 29197 - protein, 10 aa, Homo sapiens
  AACR GENIE Results; TP53_p.V73Wfs*50; A1101
ASCILGQPSL

SEQ ID NO: 29198 - protein, 9 aa, Homo sapiens
  AACR GENIE Results; TP53_p.V73Wfs*50; A0201
SCILGQPSL

SEQ ID NO: 29199 - protein, 9 aa, Homo sapiens
  AACR GENIE Results; TP53_p.V73Wfs*50; C1601
SCILGQPSL

SEQ ID NO: 29200 - protein, 9 aa, Homo sapiens
  AACR GENIE Results; TP53_p.V73Wfs*50; B0801
SCILGQPSL

SEQ ID NO: 29201 - protein, 9 aa, Homo sapiens
  AACR GENIE Results; TP53_p.V73Wfs*50; B1302
SCILGQPSL

SEQ ID NO: 29202 - protein, 11 aa, Homo sapiens
  AACR GENIE Results; TP53_p.V73Wfs*50; B0702
LPRKPTRAATV

SEQ ID NO: 29203 - protein, 9 aa, Homo sapiens
  AACR GENIE Results; TP53_p.V73Wfs*50; B4001
SCILGQPSL

SEQ ID NO: 29204 - protein, 9 aa, Homo sapiens
  AACR GENIE Results; TP53_p.V73Wfs*50; B3801
TRAATVSVW

SEQ ID NO: 29205 - protein, 9 aa, Homo sapiens
  AACR GENIE Results; TP53_p.V73Wfs*50; B3501
SCILGQPSL

SEQ ID NO: 29206 - protein, 8 aa, Homo sapiens
  AACR GENIE Results; TP53_p.V73Wfs*50; B5701
RAATVSVW

SEQ ID NO: 29207 - protein, 9 aa, Homo sapiens
  AACR GENIE Results; TP53_p.Y126C; A1101
CTCSPALNK

SEQ ID NO: 29208 - protein, 9 aa, Homo sapiens
  AACR GENIE Results; TP53_p.Y126C; A0301
CTCSPALNK

SEQ ID NO: 29209 - protein, 9 aa, Homo sapiens
  AACR GENIE Results; TP53_p.Y126C; A3001
TAKSVTCTC

SEQ ID NO: 29210 - protein, 10 aa, Homo sapiens
  AACR GENIE Results; TP53_p.Y126C; B5701
TCSPALNKMF

SEQ ID NO: 29211 - protein, 10 aa, Homo sapiens
  AACR GENIE Results; TP53_p.Y126C; A2301
TCSPALNKMF

SEQ ID NO: 29212 - protein, 10 aa, Homo sapiens
  AACR GENIE Results; TP53_p.Y126C; B4403
TCSPALNKMF

SEQ ID NO: 29213 - protein, 10 aa, Homo sapiens
  AACR GENIE Results; TP53_p.Y126C; B4402
TCSPALNKMF

SEQ ID NO: 29214 - protein, 9 aa, Homo sapiens
  AACR GENIE Results; TP53_p.Y126D; A1101
CTDSPALNK

SEQ ID NO: 29215 - protein, 9 aa, Homo sapiens
  AACR GENIE Results; TP53_p.Y126D; A0301
CTDSPALNK

SEQ ID NO: 29216 - protein, 9 aa, Homo sapiens
  AACR GENIE Results; TP53_p.Y126D; B3701
TDSPALNKM

SEQ ID NO: 29217 - protein, 8 aa, Homo sapiens
  AACR GENIE Results; TP53_p.Y126D; B5101
DSPALNKM

SEQ ID NO: 29218 - protein, 10 aa, Homo sapiens
  AACR GENIE Results; TP53_p.Y126D; B4403
TDSPALNKMF

SEQ ID NO: 29219 - protein, 10 aa, Homo sapiens
  AACR GENIE Results; TP53_p.Y126D; A1101
TCTDSPALNK

SEQ ID NO: 29220 - protein, 10 aa, Homo sapiens
  AACR GENIE Results; TP53_p.Y126D; B4402
TDSPALNKMF

SEQ ID NO: 29221 - protein, 9 aa, Homo sapiens
  AACR GENIE Results; TP53_p.Y126D; B3801
TDSPALNKM

SEQ ID NO: 29222 - protein, 8 aa, Homo sapiens
  AACR GENIE Results; TP53_p.Y126D; A1101
TDSPALNK

SEQ ID NO: 29223 - protein, 9 aa, Homo sapiens
  AACR GENIE Results; TP53_p.Y126D; C0303
VTCTDSPAL

SEQ ID NO: 29224 - protein, 10 aa, Homo sapiens
  AACR GENIE Results; TP53_p.Y126D; A0301
TCTDSPALNK

SEQ ID NO: 29225 - protein, 9 aa, Homo sapiens
  AACR GENIE Results; TP53_p.Y126D; C0304
VTCTDSPAL

SEQ ID NO: 29226 - protein, 10 aa, Homo sapiens
  AACR GENIE Results; TP53_p.Y126D; A2301
TDSPALNKMF

SEQ ID NO: 29227 - protein, 9 aa, Homo sapiens
  AACR GENIE Results; TP53_p.Y126D; B3503
VTCTDSPAL

SEQ ID NO: 29228 - protein, 10 aa, Homo sapiens
  AACR GENIE Results; TP53_p.Y126D; A6801
TCTDSPALNK

SEQ ID NO: 29229 - protein, 9 aa, Homo sapiens
  AACR GENIE Results; TP53_p.Y126D; B4002
TDSPALNKM

SEQ ID NO: 29230 - protein, 11 aa, Homo sapiens
  AACR GENIE Results; TP53_p.Y126D; A1101
VTCTDSPALNK

SEQ ID NO: 29231 - protein, 8 aa, Homo sapiens
  AACR GENIE Results; TP53_p.Y126D; B2702
TDSPALNK

SEQ ID NO: 29232 - protein, 9 aa, Homo sapiens
  AACR GENIE Results; TP53_p.Y126D; B5801
VTCTDSPAL

SEQ ID NO: 29233 - protein, 9 aa, Homo sapiens
  AACR GENIE Results; TP53_p.Y126D; B2705
CTDSPALNK

SEQ ID NO: 29234 - protein, 10 aa, Homo sapiens
  AACR GENIE Results; TP53_p.Y126D; A0101
CTDSPALNKM

SEQ ID NO: 29235 - protein, 9 aa, Homo sapiens
  AACR GENIE Results; TP53_p.Y163H; A0301
RVRAMAIHK

SEQ ID NO: 29236 - protein, 9 aa, Homo sapiens
  AACR GENIE Results; TP53_p.Y163H; B1501
AIHKQSQHM

SEQ ID NO: 29237 - protein, 9 aa, Homo sapiens
  AACR GENIE Results; TP53_p.Y205C; B0801
EGNLRVECL

SEQ ID NO: 29238 - protein, 10 aa, Homo sapiens
  AACR GENIE Results; TP53_p.Y205C; A3303
ECLDDRNTFR

SEQ ID NO: 29239 - protein, 10 aa, Homo sapiens
  AACR GENIE Results; TP53_p.Y205C; B4405
VECLDDRNTF

SEQ ID NO: 29240 - protein, 10 aa, Homo sapiens
  AACR GENIE Results; TP53_p.Y205C; A2301
VECLDDRNTF

SEQ ID NO: 29241 - protein, 9 aa, Homo sapiens
  AACR GENIE Results; TP53_p.Y205C; B1402
EGNLRVECL

SEQ ID NO: 29242 - protein, 8 aa, Homo sapiens
  AACR GENIE Results; TP53_p.Y205C; C0501
CLDDRNTF

SEQ ID NO: 29243 - protein, 9 aa, Homo sapiens
  AACR GENIE Results; TP53_p.Y205C; B5001
VEGNLRVEC

SEQ ID NO: 29244 - protein, 10 aa, Homo sapiens
  AACR GENIE Results; TP53_p.Y205C; B4002
VEGNLRVECL

SEQ ID NO: 29245 - protein, 10 aa, Homo sapiens
  AACR GENIE Results; TP53_p.Y205C; B4403
VECLDDRNTF

SEQ ID NO: 29246 - protein, 9 aa, Homo sapiens
  AACR GENIE Results; TP53_p.Y205C; B1502
ECLDDRNTF

SEQ ID NO: 29247 - protein, 9 aa, Homo sapiens
  AACR GENIE Results; TP53_p.Y205C; B4102
VEGNLRVEC

SEQ ID NO: 29248 - protein, 8 aa, Homo sapiens
  AACR GENIE Results; TP53_p.Y205F; C0501
FLDDRNTF

SEQ ID NO: 29249 - protein, 9 aa, Homo sapiens
  AACR GENIE Results; TP53_p.Y205F; B4402
VEGNLRVEF

SEQ ID NO: 29250 - protein, 9 aa, Homo sapiens
  AACR GENIE Results; TP53_p.Y205F; A2402
EFLDDRNTF

SEQ ID NO: 29251 - protein, 10 aa, Homo sapiens
  AACR GENIE Results; TP53_p.Y205F; B4402
VEFLDDRNTF

SEQ ID NO: 29252 - protein, 8 aa, Homo sapiens
  AACR GENIE Results; TP53_p.Y205F; C0401
FLDDRNTF

SEQ ID NO: 29253 - protein, 8 aa, Homo sapiens
  AACR GENIE Results; TP53_p.Y205F; B0801
EGNLRVEF

SEQ ID NO: 29254 - protein, 9 aa, Homo sapiens
  AACR GENIE Results; TP53_p.Y205F; B0801
EGNLRVEFL

SEQ ID NO: 29255 - protein, 9 aa, Homo sapiens
  AACR GENIE Results; TP53_p.Y205H; B3801
EHLDDRNTF

SEQ ID NO: 29256 - protein, 9 aa, Homo sapiens
  AACR GENIE Results; TP53_p.Y205H; B3901
EHLDDRNTF

SEQ ID NO: 29257 - protein, 10 aa, Homo sapiens
  AACR GENIE Results; TP53_p.Y205H; B4403
VEHLDDRNTF

SEQ ID NO: 29258 - protein, 9 aa, Homo sapiens
  AACR GENIE Results; TP53_p.Y205H; B0801
EGNLRVEHL

SEQ ID NO: 29259 - protein, 8 aa, Homo sapiens
  AACR GENIE Results; TP53_p.Y205H; C0501
HLDDRNTF

SEQ ID NO: 29260 - protein, 10 aa, Homo sapiens
  AACR GENIE Results; TP53_p.Y205H; B4001
VEHLDDRNTF

SEQ ID NO: 29261 - protein, 10 aa, Homo sapiens
  AACR GENIE Results; TP53_p.Y205H; B4402
VEHLDDRNTF

SEQ ID NO: 29262 - protein, 8 aa, Homo sapiens
  AACR GENIE Results; TP53_p.Y205H; C0802
HLDDRNTF

SEQ ID NO: 29263 - protein, 10 aa, Homo sapiens
  AACR GENIE Results; TP53_p.Y205H; A2301
VEHLDDRNTF

SEQ ID NO: 29264 - protein, 8 aa, Homo sapiens
  AACR GENIE Results; TP53_p.Y205H; C0401
HLDDRNTF

SEQ ID NO: 29265 - protein, 10 aa, Homo sapiens
  AACR GENIE Results; TP53_p.Y205H; A3001
VEHLDDRNTF

SEQ ID NO: 29266 - protein, 9 aa, Homo sapiens
  AACR GENIE Results; TP53_p.Y205H; B1402
EGNLRVEHL

SEQ ID NO: 29267 - protein, 9 aa, Homo sapiens
  AACR GENIE Results; TP53_p.Y205S; B0801
EGNLRVESL

SEQ ID NO: 29268 - protein, 9 aa, Homo sapiens
  AACR GENIE Results; TP53_p.Y205S; B1402
EGNLRVESL

SEQ ID NO: 29269 - protein, 10 aa, Homo sapiens
  AACR GENIE Results; TP53_p.Y205S; B4001
VEGNLRVESL

SEQ ID NO: 29270 - protein, 8 aa, Homo sapiens
  AACR GENIE Results; TP53_p.Y205S; C0501
SLDDRNTF

SEQ ID NO: 29271 - protein, 10 aa, Homo sapiens
  AACR GENIE Results; TP53_p.Y205S; B4403
VESLDDRNTF

SEQ ID NO: 29272 - protein, 9 aa, Homo sapiens
  AACR GENIE Results; TP53_p.Y205S; B5701
ESLDDRNTF

SEQ ID NO: 29273 - protein, 10 aa, Homo sapiens
  AACR GENIE Results; TP53_p.Y205S; B4001
VESLDDRNTF

SEQ ID NO: 29274 - protein, 8 aa, Homo sapiens
  AACR GENIE Results; TP53_p.Y205S; C0802
SLDDRNTF

SEQ ID NO: 29275 - protein, 9 aa, Homo sapiens
  AACR GENIE Results; TP53_p.Y205S; B0702
EGNLRVESL

SEQ ID NO: 29276 - protein, 10 aa, Homo sapiens
  AACR GENIE Results; TP53_p.Y205S; B4402
VESLDDRNTF

SEQ ID NO: 29277 - protein, 10 aa, Homo sapiens
  AACR GENIE Results; TP53_p.Y205S; A3001
VEGNLRVESL

SEQ ID NO: 29278 - protein, 9 aa, Homo sapiens
  AACR GENIE Results; TP53_p.Y205S; B3501
ESLDDRNTF

SEQ ID NO: 29279 - protein, 9 aa, Homo sapiens
  AACR GENIE Results; TP53_p.Y205S; A2601
ESLDDRNTF

SEQ ID NO: 29280 - protein, 10 aa, Homo sapiens
  AACR GENIE Results; TP53_p.Y205S; A2301
VESLDDRNTF

SEQ ID NO: 29281 - protein, 8 aa, Homo sapiens
  AACR GENIE Results; TP53_p.Y205S; C0401
SLDDRNTF

SEQ ID NO: 29282 - protein, 10 aa, Homo sapiens
  AACR GENIE Results; TP53_p.Y205S; A6801
ESLDDRNTFR

SEQ ID NO: 29283 - protein, 9 aa, Homo sapiens
  AACR GENIE Results; TP53_p.Y205S; B3801
ESLDDRNTF

SEQ ID NO: 29284 - protein, 9 aa, Homo sapiens
  AACR GENIE Results; TP53_p.Y205S; A2301
ESLDDRNTF

SEQ ID NO: 29285 - protein, 8 aa, Homo sapiens
  AACR GENIE Results; TP53_p.Y220C; B5101
VPCEPPEV

SEQ ID NO: 29286 - protein, 9 aa, Homo sapiens
  AACR GENIE Results; TP53_p.Y220C; A0206
VVPCEPPEV

SEQ ID NO: 29287 - protein, 10 aa, Homo sapiens
  AACR GENIE Results; TP53_p.Y220C; A0206
VVVPCEPPEV

SEQ ID NO: 29288 - protein, 10 aa, Homo sapiens
  AACR GENIE Results; TP53_p.Y220C; A0201
VVVPCEPPEV

SEQ ID NO: 29289 - protein, 8 aa, Homo sapiens
  AACR GENIE Results; TP53_p.Y220S; B5101
VPSEPPEV

SEQ ID NO: 29290 - protein, 9 aa, Homo sapiens
  AACR GENIE Results; TP53_p.Y220S; A0201
VVPSEPPEV

SEQ ID NO: 29291 - protein, 10 aa, Homo sapiens
  AACR GENIE Results; TP53_p.Y220S; A0201
VVVPSEPPEV

SEQ ID NO: 29292 - protein, 11 aa, Homo sapiens
  AACR GENIE Results; TP53_p.Y220S; A0201
SVVVPSEPPEV

SEQ ID NO: 29293 - protein, 9 aa, Homo sapiens
  AACR GENIE Results; TP53_p.Y234C; A3301
DCTTIHCNY

SEQ ID NO: 29294 - protein, 9 aa, Homo sapiens
  AACR GENIE Results; TP53_p.Y234C; A2601
DCTTIHCNY

SEQ ID NO: 29295 - protein, 9 aa, Homo sapiens
  AACR GENIE Results; TP53_p.Y234H; A2601
DCTTIHHNY

SEQ ID NO: 29296 - protein, 8 aa, Homo sapiens
  AACR GENIE Results; TP53_p.Y234H; C1601
CTTIHHNY

SEQ ID NO: 29297 - protein, 9 aa, Homo sapiens
  AACR GENIE Results; TP53_p.Y234H; A3301
DCTTIHHNY

SEQ ID NO: 29298 - protein, 8 aa, Homo sapiens
  AACR GENIE Results; TP53_p.Y234H; A3002
CTTIHHNY

SEQ ID NO: 29299 - protein, 9 aa, Homo sapiens
  AACR GENIE Results; TP53_p.Y234H; A6802
TTIHHNYMC

SEQ ID NO: 29300 - protein, 8 aa, Homo sapiens
  AACR GENIE Results; TP53_p.Y234H; A6802
TTIHHNYM

SEQ ID NO: 29301 - protein, 9 aa, Homo sapiens
  AACR GENIE Results; TP53_p.Y234H; B3501
DCTTIHHNY

SEQ ID NO: 29302 - protein, 9 aa, Homo sapiens
  AACR GENIE Results; TP53_p.Y234N; A2601
DCTTIHNNY

SEQ ID NO: 29303 - protein, 8 aa, Homo sapiens
  AACR GENIE Results; TP53_p.Y234N; C1601
CTTIHNNY

SEQ ID NO: 29304 - protein, 11 aa, Homo sapiens
  AACR GENIE Results; TP53_p.Y234N; A0101
GSDCTTIHNNY

SEQ ID NO: 29305 - protein, 9 aa, Homo sapiens
  AACR GENIE Results; TP53_p.Y234N; A6802
TTIHNNYMC

SEQ ID NO: 29306 - protein, 8 aa, Homo sapiens
  AACR GENIE Results; TRAF7_p.R84L; B5101
MPPISTPL

SEQ ID NO: 29307 - protein, 9 aa, Homo sapiens
  AACR GENIE Results; TSC1_p.R336W; B5701
QTLSSPSTW

SEQ ID NO: 29308 - protein, 9 aa, Homo sapiens
  AACR GENIE Results; TSC2_p.D1512N; B4001
NESNKPILL

SEQ ID NO: 29309 - protein, 9 aa, Homo sapiens
  AACR GENIE Results; TSC2_p.D1512N; B4403
NESNKPILL

SEQ ID NO: 29310 - protein, 8 aa, Homo sapiens
  AACR GENIE Results; TSC2_p.N1522S; B3501
LPSESQSF

SEQ ID NO: 29311 - protein, 9 aa, Homo sapiens
  AACR GENIE Results; TSC2_p.R1078Q; B0702
SVGTGTQSL

SEQ ID NO: 29312 - protein, 9 aa, Homo sapiens
  AACR GENIE Results; TSC2_p.R1706H; C0501
VSDHNLPFV

SEQ ID NO: 29313 - protein, 9 aa, Homo sapiens
  AACR GENIE Results; TSC2_p.R1706H; A0201
VSDHNLPFV

SEQ ID NO: 29314 - protein, 8 aa, Homo sapiens
  AACR GENIE Results; TSC2_p.R1706H; A3101
HNLPFVAR

SEQ ID NO: 29315 - protein, 9 aa, Homo sapiens
  AACR GENIE Results; TSC2_p.R1729H; B3501
MASQVHHSH

SEQ ID NO: 29316 - protein, 9 aa, Homo sapiens
  AACR GENIE Results; TSC2_p.T1070M; A0201
KLVTVMTSV

SEQ ID NO: 29317 - protein, 9 aa, Homo sapiens
  AACR GENIE Results; TSC2_p.T1070M; A0201
VMTSVGTGT

SEQ ID NO: 29318 - protein, 9 aa, Homo sapiens
  AACR GENIE Results; TSC2_p.T1070M; B1501
VGNKLVTVM

SEQ ID NO: 29319 - protein, 11 aa, Homo sapiens
  AACR GENIE Results; TSC2_p.T1070M; A1101
TVMTSVGTGTR

SEQ ID NO: 29320 - protein, 9 aa, Homo sapiens
  AACR GENIE Results; TSC2_p.T1070M; B0801
VGNKLVTVM

SEQ ID NO: 29321 - protein, 9 aa, Homo sapiens
  AACR GENIE Results; TSC2_p.V679M; B0702
GPAPAGPAM

SEQ ID NO: 29322 - protein, 9 aa, Homo sapiens
  AACR GENIE Results; TSC2_p.V679M; B0702
APAGPAMRL

SEQ ID NO: 29323 - protein, 9 aa, Homo sapiens
  AACR GENIE Results; TSC2_p.V679M; B3501
GPAPAGPAM

SEQ ID NO: 29324 - protein, 9 aa, Homo sapiens
  AACR GENIE Results; TSC2_p.V679M; B0702
GPAMRLGSV

SEQ ID NO: 29325 - protein, 10 aa, Homo sapiens
  AACR GENIE Results; XPO1_p.E571K; B5701
KTVVNKLFKF

SEQ ID NO: 29326 - protein, 9 aa, Homo sapiens
  AACR GENIE Results; XPO1_p.E571K; A2301
TVVNKLFKF

SEQ ID NO: 29327 - protein, 9 aa, Homo sapiens
  AACR GENIE Results; XPO1_p.E571K; A0301
KTVVNKLFK

SEQ ID NO: 29328 - protein, 9 aa, Homo sapiens
  AACR GENIE Results; XPO1_p.E571K; A1101
KTVVNKLFK

SEQ ID NO: 29329 - protein, 8 aa, Homo sapiens
  AACR GENIE Results; XPO1_p.E571K; A2301
VVNKLFKF

SEQ ID NO: 29330 - protein, 9 aa, Homo sapiens
  AACR GENIE Results; XPO1_p.E571K; B5701
TVVNKLFKF

SEQ ID NO: 29331 - protein, 9 aa, Homo sapiens
  AACR GENIE Results; XPO1_p.R261Q; B3503
VPMFQNVSL

SEQ ID NO: 29332 - protein, 9 aa, Homo sapiens
  AACR GENIE Results; XPO1_p.R261Q; B0702
VPMFQNVSL

SEQ ID NO: 29333 - protein, 9 aa, Homo sapiens
  AACR GENIE Results; XPO1_p.R261Q; B3501
VPMFQNVSL

SEQ ID NO: 29334 - protein, 9 aa, Homo sapiens
  AACR GENIE Results; XPO1_p.R261Q; B0801
VPMFQNVSL

SEQ ID NO: 29335 - protein, 10 aa, Homo sapiens
  AACR GENIE Results; XPO1_p.R261Q; C0102
NVPMFQNVSL

SEQ ID NO: 29336 - protein, 9 aa, Homo sapiens
  AACR GENIE Results; XPO1_p.R261Q; B5101
VPMFQNVSL

SEQ ID NO: 29337 - protein, 9 aa, Homo sapiens
  AACR GENIE Results; XPO1_p.R261Q; B5501
VPMFQNVSL

SEQ ID NO: 29338 - protein, 11 aa, Homo sapiens
  AACR GENIE Results; XPO1_p.R261Q; A6801
NVPMFQNVSLK

SEQ ID NO: 29339 - protein, 10 aa, Homo sapiens
  AACR GENIE Results; XPO1_p.R261Q; A6802
NVPMFQNVSL

SEQ ID NO: 29340 - protein, 11 aa, Homo sapiens
  AACR GENIE Results; XPO1_p.R261Q; B2702
NVPMFQNVSLK

SEQ ID NO: 29341 - protein, 10 aa, Homo sapiens
  AACR GENIE Results; XPO1_p.R261Q; A6801
VPMFQNVSLK

SEQ ID NO: 29342 - protein, 9 aa, Homo sapiens
  AACR GENIE Results; XPO1_p.R44I; B3801
YHGEGAQQI

SEQ ID NO: 29343 - protein, 9 aa, Homo sapiens
  AACR GENIE Results; XPO1_p.R44I; B1501
QQIMAQEVL

SEQ ID NO: 29344 - protein, 10 aa, Homo sapiens
  AACR GENIE Results; XPO1_p.R44I; B3801
YHGEGAQQIM

SEQ ID NO: 29345 - protein, 9 aa, Homo sapiens
  AACR GENIE Results; XPO1_p.R44I; A0301
IMAQEVLTH

SEQ ID NO: 29346 - protein, 9 aa, Homo sapiens
  AACR GENIE Results; XPO1_p.R44I; B1501
IMAQEVLTH

SEQ ID NO: 29347 - protein, 9 aa, Homo sapiens
  AACR GENIE Results; XPO1_p.R44I; B3801
QQIMAQEVL

SEQ ID NO: 29348 - protein, 9 aa, Homo sapiens
  AACR GENIE Results; XPO1_p.R44I; B3501
HGEGAQQIM

SEQ ID NO: 29349 - protein, 10 aa, Homo sapiens
  AACR GENIE Results; XPO1_p.R44I; A0201
IMAQEVLTHL

SEQ ID NO: 29350 - protein, 9 aa, Homo sapiens
  AACR GENIE Results; XPO1_p.R44I; B1501
AQQIMAQEV

SEQ ID NO: 29351 - protein, 8 aa, Homo sapiens
  AACR GENIE Results; XPO1_p.R44I; B1501
QQIMAQEV

SEQ ID NO: 29352 - protein, 9 aa, Homo sapiens
  AACR GENIE Results; XPO1_p.R749Q; B1402
MQTVKRETL

SEQ ID NO: 29353 - protein, 9 aa, Homo sapiens
  AACR GENIE Results; XPO1_p.R749Q; B2705
IRSMQTVKR

SEQ ID NO: 29354 - protein, 9 aa, Homo sapiens
  AACR GENIE Results; XPO1_p.R749Q; A1101
QTVKRETLK

SEQ ID NO: 29355 - protein, 8 aa, Homo sapiens
  AACR GENIE Results; XPO1_p.R749Q; B0801
QTVKRETL

SEQ ID NO: 29356 - protein, 9 aa, Homo sapiens
  AACR GENIE Results; XPO1_p.R749Q; B0801
MQTVKRETL

SEQ ID NO: 29357 - protein, 11 aa, Homo sapiens
  AACR GENIE Results; XPO1_p.R749Q; B0702
RSMQTVKRETL
